(19) United States
(12) Patent Application Publication
(10) Pub. No.: US 2011/0020320 A1
(43) Pub. Date: Jan. 27, 2011

(54) Genetic Variants Contributing to Risk of Prostate Cancer

(75) Inventors: Julius Gudmundsson, Reykjavik (IS); Patrick Sulem, Reykjavik (IS)

Correspondence Address: MARSHALL, GERSTEIN & BORUN LLP, 233 SOUTH WACKER DRIVE, 6300 WILLIS TOWER, CHICAGO, IL, 60606-6357, US

(73) Assignee: deCODE Genetics ehf., Reykjavik (IS)

(21) Appl. No.: 12/777,113

(22) Filed: May 10, 2010

(30) Foreign Application Priority Data
May 8, 2009 (IS) 8819

(51) Int. Cl. A61K 39/395; G06F 19/00

(52) U.S. Cl. 424/130.1; 702/19

(57) ABSTRACT

It has been discovered that certain genetic markers are associated with risk of prostate cancer. The invention describes diagnostic applications for determining a susceptibilty to prostate cancer using such markers, including methods, uses, kits, and computer applications.

[0001] Cancer, the uncontrolled growth of malignant cells, is a major health problem of the modern medical era and is one of the leading causes of death in developed countries. In the United States, one in four deaths is caused by cancer (Jemal, A. et al., CA Cancer J. Clin. 52:23-47 (2002)).

[0002] The incidence of prostate cancer has dramatically increased over the last decades and prostate cancer is now a leading cause of death in the United States and Western Europe (Peschel, R. E. and J. W. Colberg, Lancet 4:233-41 (2003); Nelson, W. G. et al., N. Engl. J. Med. 349(4):366-81 (2003)). Prostate cancer is the most frequently diagnosed non-cutaneous malignancy among men in industrialized countries, and in the United States, 1 in 8 men will develop prostate cancer during his life (Simard, J. et al., Endocrinology 143(6):2029-40 (2002)). Although environmental factors, such as dietary factors and lifestyle-related factors, contribute to the risk of prostate cancer, genetic factors have also been shown to play an important role. Indeed, a positive family history is among the strongest epidemiological risk factors for prostate cancer, and twin studies comparing the concordant occurrence of prostate cancer in monozygotic twins have consistently revealed a stronger hereditary component in the risk of prostate cancer than in any other type of cancer (Nelson, W. G. et al., N. Engl. J. Med. 349(4):366-81 (2003); Lichtenstein P. et al., N. Engl. J. Med. 343(2):78-85 (2000)). In addition, an increased risk of prostate cancer is seen in 1^{st} to 5^{th} degree relatives of prostate cancer cases in a nationwide study on the familiality of all cancer cases diagnosed in Iceland from 1955-2003 (Amundadottir et al., PLoS Medicine 1(3):e65 (2004)). The genetic basis for this disease, emphasized by the increased risk among relatives, is further supported by studies of prostate cancer among particular populations: for example, African Americans have among the highest incidence of prostate cancer and mortality rate attributable to this disease: they are 1.6 times as likely to develop prostate cancer and 2.4 times as likely to die from this disease than European Americans (Ries, L. A. G. et al., NIH Pub. No. 99-4649 (1999)).

[0003] An average 40% reduction in life expectancy affects males with prostate cancer. If detected early, prior to metastasis and local spread beyond the capsule, prostate cancer can be cured (e.g., using surgery). However, if diagnosed after spread and metastasis from the prostate, prostate cancer is typically a fatal disease with low cure rates. While prostate-specific antigen (PSA)-based screening has aided early diagnosis of prostate cancer, it is neither highly sensitive nor specific (Punglia et al., N Engl J Med. 349(4):335-42 (2003)). This means that a high percentage of false negative and false positive diagnoses are associated with the test. The consequences are both too many instances of missed cancers and unnecessary follow-up biopsies for those without cancer. As many as 65 to 85% of individuals (depending on age) with prostate cancer have a PSA value less than or equal to 4.0 ng/mL, which has traditionally been used as the upper limit for a normal PSA level (Punglia et. al., N Engl J. Med. 349(4):335-42 (2003); Cookston, M. S., Cancer Control 8(2):133-40 (2001); Thompson, I. M. et. al., N Engl J Med. 350:2239-46 (2004)). A significant fraction of those cancers with low PSA levels are scored as Gleason grade 7 or higher, which is a measure of an aggressive prostate cancer.

[0004] In addition to the sensitivity problem outlined above, PSA testing also has difficulty with specificity and predicting prognosis. PSA levels can be abnormal in those without prostate cancer. For example, benign prostatic hyperplasia (BPH) is one common cause of a false-positive PSA test. In addition, a variety of non-cancer conditions may elevate serum PSA levels, including urinary retention, prostatitis, vigorous prostate massage and ejaculation.

[0005] Furthermore, subsequent confirmation of prostate cancer using needle biopsy in patients with positive PSA levels is difficult if the tumor is too small to see by ultrasound. Multiple random samples are typically taken but diagnosis of prostate cancer may be missed because of the sampling of only small amounts of tissue. Digital rectal examination (DRE) also misses many cancers because only the posterior lobe of the prostate is examined. As early cancers are nonpalpable, cancers detected by DRE may already have spread outside the prostate (Mistry K. J., Am. Board Fam. Pract. 16(2):95-101 (2003)).

[0006] Thus, there is clearly a great need for improved diagnostic procedures that would facilitate early-stage prostate cancer detection and prognosis, as well as aid in preventive and curative treatments of the disease that would help to avoid invasive and costly procedures for patients not at significant risk.

[0007] Genetic risk is conferred by subtle differences in genes among individuals in a population. Genes differ between individuals most frequently due to single nucleotide polymorphisms (SNP), although other variations are also important. SNP are located on average every 1000 base pairs in the human genome. Accordingly, a typical human gene containing 250,000 base pairs may contain 250 different SNP. Only a minor number of SNPs are located in exons and alter the amino acid sequence of the protein encoded by the gene. Most SNPs may have little or no effect on gene function, while others may alter transcription, splicing, translation, or stability of the mRNA encoded by the gene. Additional genetic polymorphism in the human genome is caused by insertion, deletion, translocation, or inversion of either short or long stretches of DNA. Genetic polymorphisms conferring disease risk may therefore directly alter the amino acid sequence of proteins, may increase the amount of protein produced from the gene, or may decrease the amount of protein produced by the gene.

[0008] As genetic polymorphisms conferring risk of common diseases are uncovered, genetic testing for such risk factors is becoming important for clinical medicine. Examples are apolipoprotein E testing to identify genetic carriers of the apoE4 polymorphism in dementia patients for the differential diagnosis of Alzheimer's disease, and of Factor V Leiden testing for predisposition to deep venous thrombosis. More importantly, in the treatment of cancer, diagnosis of genetic variants in tumor cells is used for the selection of the most appropriate treatment regime for the individual patient. In breast cancer, genetic variation in estrogen receptor expression or heregulin type 2 (Her2) receptor tyrosine kinase expression determine if anti-estrogenic drugs (tamoxifen) or anti-Her2 antibody (Herceptin) will be incorporated into the treatment plan. In chronic myeloid leukemia (CML) diagnosis of the Philadelphia chromosome genetic translocation fusing the genes encoding the Bcr and Abl receptor tyrosine kinases indicates that Gleevec (STI571), a specific inhibitor of the Bcr-Abl kinase should be used for treatment of the cancer. For CML patients with such a genetic alteration, inhibition of the Bcr-Abl kinase leads to rapid elimination of the tumor cells and remission from leukemia.

[0009] Although genetic factors are among the strongest epidemiological risk factors for prostate cancer, the search for genetic determinants involved in the disease has been challenging. Studies have revealed that linking candidate genetic markers to prostate cancer has been more difficult than identifying susceptibility genes for other cancers, such as breast, ovary and colon cancer. Several reasons have been proposed for this increased difficulty including: the fact that prostate cancer is often diagnosed at a late age thereby often making it difficult to obtain DNA samples from living affected individuals for more than one generation; the presence within high-risk pedigrees of phenocopies that are associated with a lack of distinguishing features between hereditary and sporadic forms; and the genetic heterogeneity of prostate cancer and the accompanying difficulty of developing appropriate statistical transmission models for this complex disease (Simard, J. et al., Endocrinology 143(6):2029-40 (2002)).

[0010] Various genome scans for prostate cancer-susceptibility genes have been conducted and several prostate cancer susceptibility loci have been reported. For example, HPC1 (1q24-q25), PCAP (1q42-q43), HCPX (Xq27-q28), CAPB (1p36), HPC20 (20q13), HPC2/ELAC2 (17p11) and 16q23 have been proposed as prostate cancer susceptibility loci (Simard, J. et al., Endocrinology 143(6):2029-40 (2002); Nwosu, V. et al., Hum. Mol. Genet. 10(20):2313-18 (2001)). In a genome scan conducted by Smith et al., the strongest evidence for linkage was at HPC1, although two-point analysis also revealed a LOD score of ≧1.5 at D4S430 and LOD scores ≧1.0 at several loci, including markers at Xq27-28 (Ostrander E. A. and J. L. Stanford, Am. J. Hum. Genet. 67:1367-75 (2000)). In other genome scans, two-point LOD scores of 1.5 for chromosomes 10q, 12q and 14q using an autosomal dominant model of inheritance, and chromosomes 1q, 8q, 10q and 16p using a recessive model of inheritance, have been reported, as well as nominal evidence for linkage to chr 2q, 12p, 15q, 16q and 16p. A genome scan for prostate cancer predisposition loci using a small set of Utah high risk prostate cancer pedigrees and a set of 300 polymorphic markers provided evidence for linkage to a locus on chromosome 17p (Simard, J. et al., Endocrinology 143(6):2029-40 (2002)). Eight new linkage analyses were published in late 2003, which depicted remarkable heterogeneity. Eleven peaks with LOD scores higher than 2.0 were reported, none of which overlapped (see Actane consortium, Schleutker et al., Wiklund et al., Witte et al., Janer et al., Xu et al., Lange et al., Cunningham et al.; all of which appear in Prostate, vol. 57 (2003)).

[0011] As described above, identification of particular genes involved in prostate cancer has been challenging. One gene that has been implicated is RNASEL, which encodes a widely expressed latent endoribonuclease that participates in an interferon-inducible RNA-decay pathway believed to degrade viral and cellular RNA, and has been linked to the HPC locus (Carpten, J. et al., Nat. Genet. 30:181-84 (2002); Casey, G. et al., Nat. Genet. 32(4):581-83 (2002)). Mutations in RNASEL have been associated with increased susceptibility to prostate cancer. For example, in one family, four brothers with prostate cancer carried a disabling mutation in RNASEL, while in another family, four of six brothers with prostate cancer carried a base substitution affecting the initiator methionine codon of RNASEL. Other studies have revealed mutant RNASEL alleles associated with an increased risk of prostate cancer in Finnish men with familial prostate cancer and an Ashkenazi Jewish population (Rokman, A. et al., Am J. Hum. Genet. 70:1299-1304 (2002); Rennert, H. et al., Am J. Hum. Genet. 71:981-84 (2002)). In addition, the Ser217Leu genotype has been proposed to account for approximately 9% of all sporadic cases in Caucasian Americans younger than 65 years (Stanford, J. L., Cancer Epidemiol. Biomarkers Prev. 12(9):876-81 (2003)). In contrast to these positive reports, however, some studies have failed to detect any association between RNASEL alleles with inactivating mutations and prostate cancer (Wang, L. et al., Am. J. Hum. Genet. 71:116-23 (2002); Wiklund, F. et al., Clin. Cancer Res. 10(21):7150-56 (2004); Maier, C. et. al., Br. J. Cancer 92(6):1159-64 (2005)).

[0012] The macrophage-scavenger receptor 1 (MSR1) gene, which is located at 8p22, has also been identified as a candidate prostate cancer-susceptibility gene (Xu, J. et al., Nat. Genet. 32:321-25 (2002)). A mutant MSR1 allele was detected in approximately 3% of men with nonhereditary prostate cancer but only 0.4% of unaffected men. However, not all subsequent reports have confirmed these initial findings (see, e.g., Lindmark, F. et al., Prostate 59(2):132-40 (2004); Seppala, E. H. et al., Clin. Cancer Res. 9(14):5252-56 (2003); Wang, L. et al., Nat. Genet. 35(2):128-29 (2003); Miller, D. C. et al., Cancer Res. 63(13):3486-89 (2003)). MSR1 encodes subunits of a macrophage-scavenger receptor that is capable of binding a variety of ligands, including bacterial lipopolysaccharide and lipoteicholic acid, and oxidized high-density lipoprotein and low-density lipoprotein in serum (Nelson, W. G. et al., N. Engl. J. Med. 349(4):366-81 (2003)).

[0013] The ELAC2 gene on Chr17p was the first prostate cancer susceptibility gene to be cloned in high risk prostate cancer families from Utah (Tavtigian, S. V., et al., Nat. Genet. 27(2):172-80 (2001)). A frameshift mutation (1641InsG) was found in one pedigree. Three additional missense changes: Ser217Leu; Ala541Thr; and Arg781His, were also found to associate with an increased risk of prostate cancer. The relative risk of prostate cancer in men carrying both Ser217Leu and Ala541Thr was found to be 2.37 in a cohort not selected on the basis of family history of prostate cancer (Rebbeck, T. R., et al., Am. J. Hum. Genet. 67(4):1014-19 (2000)). Another study described a new termination mutation (Glu216X) in one high incidence prostate cancer family (Wang, L., et al., Cancer Res. 61(17):6494-99 (2001)). Other reports have not demonstrated strong association with the three missense mutations, and a recent metaanalysis suggests that the familial risk associated with these mutations is more moderate than was indicated in initial reports (Vesprini, D., et al., Am. J. Hum. Genet. 68(4):912-17 (2001); Shea, P. R., et al., Hum. Genet. 111(4-5):398-400 (2002); Suarez, B. K., et al., Cancer Res. 61(13):4982-84 (2001); Severi, G., et al., J. Natl. Cancer Inst. 95(11):818-24 (2003); Fujiwara, H., et al., J. Hum. Genet. 47(12):641-48 (2002); Camp, N. J., et al., Am. J. Hum. Genet. 71(6):1475-78 (2002)).

[0014] Polymorphic variants of genes involved in androgen action (e.g., the androgen receptor (AR) gene, the cytochrome P-450c17 (CYP17) gene, and the steroid-5-α-reductase type II (SRD5A2) gene), have also been implicated in increased risk of prostate cancer (Nelson, W. G. et al., N. Engl. J. Med. 349(4):366-81 (2003)). With respect to AR, which encodes the androgen receptor, several genetic epidemiological studies have shown a correlation between an increased risk of prostate cancer and the presence of short androgen-receptor polyglutamine repeats, while other studies have failed to detect such a correlation. Linkage data has also implicated an allelic form of CYP17, an enzyme that catalyzes key reactions in sex-steroid biosynthesis, with prostate cancer (Chang, B. et al., Int. J. Cancer 95:354-59 (2001)). Allelic variants of SRD5A2, which encodes the predominant isozyme of 5-α-reductase in the prostate and functions to convert testosterone to the more potent dihydrotestosterone, have been associated with an increased risk of prostate cancer and with a poor prognosis for men with prostate cancer (Makridakis, N. M. et al., Lancet 354:975-78 (1999); Nam, R. K. et al., Urology 57:199-204 (2001)).

[0015] Despite the effort of many groups around the world, the genes that account for a substantial fraction of prostate cancer risk have not been identified. Although twin studies have implied that genetic factors are likely to be prominent in prostate cancer, relatively few genes have been identified as being associated with an increased risk for prostate cancer, and these genes account for only a low percentage of cases. Thus, it could be that the majority of genetic risk factors for prostate cancer remain to be found. It is likely that these genetic risk factors will include a relatively high number of low-to-medium risk genetic variants but indeed be responsible for a substantial fraction of prostate cancer, and their identification, therefore, a great benefit for public health.

[0016] Identification of new variants for prostate cancer has important diagnostic applications, as they can be used to identify those at particularly at risk for prostate cancer genetic susceptibility. Such variants can for example be incorporated in diagnostic applications that have already been developed. The present invention provides such variants.

### SUMMARY OF THE INVENTION

[0017] The present inventors have discovered that certain polymorphic markers are associated with risk of prostate cancer. Such markers are useful in a number of diagnostic applications, as described further herein. The markers can also be used in certain aspects that relate to development of markers for diagnostic use, systems and apparati for diagnostic use, as well as in methods that include selection of individuals based on their genetic status with respect to such variants. These and other aspects of the invention are described in more detail herein.

[0018] In one aspect the invention relates to a method of determining a susceptibility to prostate cancer, the method comprising obtaining nucleic acid sequence data about a human individual identifying at least one allele of at least one polymorphic marker, wherein different alleles of the at least one polymorphic marker are associated with different susceptibilities to prostate cancer in humans, and determining a susceptibility to prostate cancer from the nucleic acid sequence data, wherein the at least one polymorphic marker is selected from the group consisting of rs16902094, rs8102476, rs10934853 and rs445114, and markers in linkage disequilibrium therewith. In one embodiment, the nucleic acid sequence data is sequence data from a nucleic acid sample from the human individual.

[0019] In some variations, the methods of the invention further include a step, prior to the analyzing step, of obtaining the nucleic acid sequence data from a biological sample from the human individual, where the biological sample contains nucleic acid from the human individual. Many techniques are available for obtaining nucleic acid sequence data from a biological sample. In some variations, the obtaining of nucleic acid sequence data comprises a method that includes at least one procedure selected from amplifying nucleic acid from the biological sample, and performing a hybridization assay using a nucleic acid probe and nucleic acid from the biological sample (or using amplified nucleic acid obtain from amplifying nucleic acid from the biological sample).

[0020] In some variations of the methods disclosed herein, nucleic acid sequence data from the human individual is analyzed for at least one allele of at least two of said polymorphic markers, wherein different haplotypes comprising alleles of the at least two polymorphic markers are associated with different susceptibilities to prostate cancer in humans. In still other variations, nucleic acid sequence data from the individual is analyzed for at least two alleles of a polymorphic marker, or at least two alleles of two or more polymorphic markers. Analyses for all combinations of numbers of markers and alleles for the markers described herein are specifically contemplated, especially all combinations of two, three, or four of the markers rs16902094, rs8102476, rs10934853 and rs445114, or markers in linkage disequilibrium therewith. As described in further detail herein, polymorphic markers can comprise variations comprising one or more nucleotides at the nucleotide level. Sequence data indicative of a particular polymorphisms, in particular with respect to specific alleles of a polymorphism, is thus indicative of the nucleotides that are present at the specific polymorphic site(s) that characterize the polymorphism. For polymorphisms that comprise a single nucleotide, (so called single nucleotide polymorphisms (SNPs)), the sequence data thus includes at least sequence for the single nucleotide characteristic of the polymorphism.

[0021] In a related aspect, the invention includes a method of determining nucleic acid sequence data indicative of a susceptibility to prostate cancer, the method comprising: analyzing nucleic acid from a human individual to obtain nucleic acid data for at least one allele of at least one polymorphic marker selected from the group consisting of rs16902094, rs8102476, rs10934853 and rs445114, and markers in linkage disequilibirium therewith; wherein different alleles of the at least one polymorphic marker are associated with different susceptibilities to prostate cancer in humans, and preparing a report containing the nucleic acid sequence data for said at least one allele of the at least one polymorphic marker, wherein the report is written to a tangible medium such as a computer readable medium or printed on paper; or wherein the report is displayed on a visual display, such as a computer screen or other electronic display. Exemplary techniques for analyzing nucleic acid include any techniques that provide the sequence information of interest, including but not limited to techniques that include amplifying nucleic acid from a biological sample from the human individual; performing a hybridization assay using a nucleic acid probe and nucleic acid from the human individual, or from the results of such amplifying; or any available sequencing technologies (some of which involve amplification and hybridization steps).

[0022] The invention in another aspect relates to a method for determining a susceptibility to prostate cancer in a human individual, comprising determining the presence or absence of at least one allele of at least one polymorphic marker in a nucleic acid sample obtained from the individual, or in a genotype dataset from the individual, wherein the at least one polymorphic marker is selected from the group consisting of rs16902094, rs8102476, rs10934853 and rs445114, and markers in linkage disequilibrium therewith, and wherein determination of the presence of the at least one allele is indicative of a susceptibility to prostate cancer. In some variations, the susceptibility to prostate cancer is displayed on a visual display selected from the group consisting of an electronic display and a printed report. Further aspects of the methods comprise reporting the susceptibility to prostate cancer for the marker in linkage disequilibrium on a visual display, or recording the susceptibility in a computer-readable medium or printed report.

[0023] The invention also relates to a method of screening a candidate marker for assessing susceptibility to prostate cancer, comprising analyzing the frequency of at least one allele of at least one polymorphic marker selected from the group consisting of the markers set forth in Table 8, Table 9, Table 10 and Table 11, in a population of human individuals diagnosed with prostate cancer, wherein a significant difference in frequency of the at least one allele in the population of human individuals diagnosed with prostate cancer as compared to the frequency of the at least one allele in a control population of human individuals is indicative of the marker being useful as a susceptibility marker for prostate cancer.

[0024] Another aspect of the invention relates to a method of identification of a marker for use in assessing susceptibility to prostate cancer, the method comprising (a) identifying at least one polymorphic marker in linkage disequilibrium with at least one marker selected from the group consisting of rs16902094, rs8102476, rs10934853 and rs445114; (b) obtaining nucleic acid sequence data about a plurality of human individuals diagnosed with prostate cancer, and a plurality of control individuals, determining the presence or absence at least one allele of the at the least one polymorphic marker in the nucleic acid sequence data; and (c) determine the difference in frequency of the at least one allele between the individuals diagnosed with prostate cancer and the control group; wherein determination of a significant difference in frequency of the at least one allele is indicative of the at least one marker being useful for assessing susceptibility to prostate cancer.

[0025] The invention furthermore relates to a method of predicting prognosis of an individual diagnosed with prostate cancer, the method comprising obtaining nucleic acid sequence data about the human individual identifying at least one allele of at least one polymorphic marker selected from the group consisting of rs16902094, rs8102476, rs10934853 and rs445114, and markers in linkage disequilibrium therewith, wherein different alleles of the at least one polymorphic marker are associated with different susceptibilities to prostate cancer in humans, and predicting prognosis of the individual from the nucleic acid sequence data.

[0026] The invention in a further aspect relates to a method of assessing an individual for probability of response to a therapeutic agent for preventing, treating, and/or ameliorating symptoms associated with prostate cancer, comprising: determining the identity of at least one allele of at least one polymorphic marker in a nucleic acid sample obtained from the individual, or in a genotype dataset derived from the individual, wherein the at least one polymorphic marker is selected from the group consisting of rs16902094, rs8102476, rs10934853 and rs445114, and markers in linkage disequilibrium therewith, and wherein the identity of the at least one allele of the at least one marker is indicative of a probability of a positive response to the therapeutic agent.

[0027] With respect to any method of the invention that indicates an increased susceptibility to prostate cancer, a further variation of the invention further includes prescribing and/or administering to the human individual with the increased susceptibility a standard of care therapeutic for prostate health. Exemplary therapeutics include therapeutics for prostate cancer, used in a prophylactic context; therapeutics for benign prostate hypertrophy; and therapeutics believed to have a beneficial health effect or anticancer properties with respect to prostate.

[0028] The invention further relates to the use of an oligonucleotide probe in the manufacture of a diagnostic reagent for use in diagnosing and/or assessing susceptibility to prostate cancer in a human individual, wherein the probe hybridizes to a segment of a nucleic acid with sequence as set forth in any one of SEQ ID NO:1-978 that comprises at least one polymorphic site, and wherein the fragment is 15-400 nucleotides in length.

[0029] The invention also provides kits useful in the diagnostic applications described herein. Accordingly, in one aspect, the invention relates to a kit for assessing susceptibility to prostate cancer in a human individual, the kit comprising reagents for selectively detecting at least one allele of at least one polymorphic marker in the human genome of the human individual, wherein the polymorphic marker is selected from the group consisting rs16902094, rs8102476, rs10934853 and rs445114, and markers in linkage disequilibrium therewith, and a collection of data comprising correlation data between the at least one polymorphic marker and susceptibility to prostate cancer.

[0030] In various aspects, the kit contains reagents for selectively detecting at least one allele of at least two of said polymorphic markers. In further aspects, the reagents comprise, for each of said at least two polymorphic markers, at least one contiguous oligonucleotide that hybridizes to a fragment of the genome of the individual comprising the polymorphic marker. In still further aspects, the reagents comprise, for each polymorphic marker, at least two contiguous oligonucleotides that hybridize to a fragment of the human genome comprising the polymorphic marker, wherein each of the at least two oligonucleotides selectively recognize a different allele of the polymorphic marker. The present disclosure also contemplates, in various aspects, that at least one of the oligonucleotides contains a detectable label.

[0031] A collection of data is not an essential element to all kits of the invention. In some variations, the invention includes a kit for assessing susceptibility to prostate cancer in a human individual, the kit comprising reagents for selectively detecting at least one allele of at least two polymorphic marker in the human genome, wherein the at least two polymorphic markers are selected from the group consisting of rs16902094, rs8102476, rs10934853 and rs445114, and markers in linkage disequilibrium therewith.

[0032] Computer-implemented aspects of the invention include computer-readable media and computer systems and apparati. One aspect relates to a computer-readable medium having computer executable instructions for determining susceptibility to prostate cancer, the computer readable medium comprising: data identifying at least one allele of at least one polymorphic marker for at least one human subject; a routine stored on the computer readable medium and adapted to be executed by a processor to determine risk of developing prostate cancer for the at least one polymorphic marker for the subject; wherein the at least one polymorphic marker is selected from the group consisting of rs16902094, rs8102476, rs10934853 and rs445114, and markers in linkage disequilibrium therewith.

[0033] Another computer-implemented aspect relates to an apparatus for determining a genetic indicator for prostate cancer in a human individual, comprising a processor, and a computer readable memory having computer executable instructions adapted to be executed on the processor to analyze marker and/or haplotype information for at least one human individual with respect to at least one polymorphic marker selected from the group consisting of rs16902094, rs8102476, rs10934853 and rs445114, and markers in linkage disequilibrium therewith, and generate an output based on the marker or haplotype information, wherein the output comprises a measure of susceptibility of the at least one marker or haplotype as a genetic indicator of prostate cancer for the human individual.

[0034] These and other aspects of the invention will be described in detail in the following, and all such features are intended as aspects of the invention. Particular embodiments will be described, in particular as they relate to the selection and use of polymorphic variants and haplotypes. It should be understood that all combinations of features described herein in the following are contemplated, even if the combination of feature is not specifically found in the same sentence or paragraph herein. This includes in particular the use of all markers disclosed herein, alone or in combination, for analysis individually or in haplotypes, in all aspects of the invention as described herein.

[0035] Aspects of the invention described with the term “comprising” should be understood to include the elements explicitly listed, and optionally, additional elements. Aspects of the invention described with “a” or “an” should be understood to include “one or more” unless the context clearly requires a narrower meaning.

[0036] Moreover, features of the invention described herein can be re-combined into additional embodiments that also are intended as aspects of the invention, irrespective of whether the combination of features is specifically mentioned above as an aspect or embodiment of the invention. Also, only those limitations that are described herein as critical to the invention should be viewed as such; variations of the invention lacking features that have not been described herein as critical are intended as aspects of the invention.

[0037] With respect to aspects of the invention that have been described as a set or genus, every individual member of the set or genus is intended, individually, as an aspect of the invention, even if, for brevity, every individual member has not been specifically mentioned herein. When aspects of the invention that are described herein as being selected from a genus, it should be understood that the selection can include mixtures of two or more members of the genus. Similarly, with respect to aspects of the invention that have been described as a range, such as a range of values, every sub-range within the range is considered an aspect of the invention.

[0038] In addition to the foregoing, the invention includes, as an additional aspect, all embodiments of the invention narrower in scope in any way than the variations specifically described herein. Although the applicant(s) invented the full scope of the claims appended hereto, the claims appended hereto are not intended to encompass within their scope the prior art work of others. Therefore, in the event that statutory prior art within the scope of a claim is brought to the attention of the applicants by a Patent Office or other entity or individual, the applicant(s) reserve the right to exercise amendment rights under applicable patent laws to redefine the subject matter of such a claim to specifically exclude such statutory prior art or obvious variations of statutory prior art from the scope of such a claim. Variations of the invention defined by such amended claims also are intended as aspects of the invention. In all cases, claims should be construed to cover only subject matter eligible for protection under the patent statute.

### BRIEF DESCRIPTION OF THE DRAWINGS

[0039] The foregoing and other objects, features and advantages of the invention will be apparent from the following more particular description of preferred embodiments of the invention.

[0040] FIG. 1 provides a diagram illustrating a computer-implemented system utilizing risk variants as described herein.

[0041] FIG. 2 shows a schematic view of the 8q24 region. Shown are, from top to bottom, the currently described and previously reported three prostate- and one breast cancer risk variants on 8q24, the pairwise correlation (r²) between SNPs based on the CEU HapMap data, and the HapMap recombination hotspots and recombination rates.

### DETAILED DESCRIPTION

### Definitions

[0042] Unless otherwise indicated, nucleic acid sequences are written left to right in a 5′ to 3′ orientation. Numeric ranges recited within the specification are inclusive of the numbers defining the range and include each integer or any non-integer fraction within the defined range. Unless defined otherwise, all technical and scientific terms used herein have the same meaning as commonly understood by the ordinary person skilled in the art to which the invention pertains.

[0043] The following terms shall, in the present context, have the meaning as indicated:

[0044] A “polymorphic marker”, sometime referred to as a “marker”, as described herein, refers to a genomic polymorphic site. Each polymorphic marker has at least two sequence variations characteristic of particular alleles at the polymorphic site. Thus, genetic association to a polymorphic marker implies that there is association to at least one specific allele of that particular polymorphic marker. The marker can comprise any allele of any variant type found in the genome, including SNPs, mini- or microsatellites, translocations and copy number variations (insertions, deletions, duplications). Polymorphic markers can be of any measurable frequency in the population. For mapping of disease genes, polymorphic markers with population frequency higher than 5-10% are in general most useful. However, polymorphic markers may also have lower population frequencies, such as 1-5% frequency, or even lower frequency, in particular copy number variations (CNVs). The term shall, in the present context, be taken to include polymorphic markers with any population frequency.

[0045] An “allele” refers to the nucleotide sequence of a given locus (position) on a chromosome. A polymorphic marker allele thus refers to the composition (i.e., sequence) of the marker on a chromosome. Genomic DNA from an individual contains two alleles (e.g., allele-specific sequences) for any given polymorphic marker, representative of each copy of the marker on each chromosome. Sequence codes for nucleotides used herein are: A=1, C=2, G=3, T=4. For microsatellite alleles, the CEPH sample (Centre d'Etudes du Polymorphisme Humain, genomics repository, CEPH sample 1347-02) is used as a reference, the shorter allele of each microsatellite in this sample is set as 0 and all other alleles in other samples are numbered in relation to this reference. Thus, e.g., allele 1 is 1 bp longer than the shorter allele in the CEPH sample, allele 2 is 2 bp longer than the shorter allele in the CEPH sample, allele 3 is 3 bp longer than the lower allele in the CEPH sample, etc., and allele −1 is 1 bp shorter than the shorter allele in the CEPH sample, allele −2 is 2 bp shorter than the shorter allele in the CEPH sample, etc.

[0046] Sequence conucleotide ambiguity as described herein is as proposed by IUPAC-IUB. These codes are compatible with the codes used by the EMBL, GenBank, and PIR databases.

| IUB code | Meaning |
|---|---|
| A | Adenosine |
| C | Cytidine |
| G | Guanine |
| T | Thymidine |
| R | G or A |
| Y | T or C |
| K | G or T |
| M | A or C |
| S | G or C |
| W | A or T |
| B | C, G or T |
| D | A, G or T |
| H | A, C or T |
| V | A, C or G |
| N | A, C, G or T (Any base) |

[0047] A nucleotide position at which more than one sequence is possible in a population (either a natural population or a synthetic population, e.g., a library of synthetic molecules) is referred to herein as a “polymorphic site”.

[0048] A “Single Nucleotide Polymorphism” or “SNP” is a DNA sequence variation occurring when a single nucleotide at a specific location in the genome differs between members of a species or between paired chromosomes in an individual. Most SNP polymorphisms have two alleles. Each individual is in this instance either homozygous for one allele of the polymorphism (i.e. both chromosomal copies of the individual have the same nucleotide at the SNP location), or the individual is heterozygous (i.e. the two sister chromosomes of the individual contain different nucleotides). The SNP nomenclature as reported herein refers to the official Reference SNP (rs) ID identification tag as assigned to each unique SNP by the National Center for Biotechnological Information (NCBI).

[0049] A “variant”, as described herein, refers to a segment of DNA that differs from the reference DNA. A “marker” or a “polymorphic marker”, as defined herein, is a variant. Alleles that differ from the reference are referred to as “variant” alleles.

[0050] A “microsatellite” is a polymorphic marker that has multiple small repeats of bases that are 2-8 nucleotides in length (such as CA repeats) at a particular site, in which the number of repeat lengths varies in the general population. An “indel” is a common form of polymorphism comprising a small insertion or deletion that is typically only a few nucleotides long.

[0051] A “haplotype,” as described herein, refers to a segment of genomic DNA that is characterized by a specific combination of alleles arranged along the segment. For diploid organisms such as humans, a haplotype comprises one member of the pair of alleles for each polymorphic marker or locus along the segment. In a certain embodiment, the haplotype can comprise two or more alleles, three or more alleles, four or more alleles, or five or more alleles. Haplotypes are described herein in the context of the marker name and the allele of the marker in that haplotype, e.g., “3 rs16902094” refers to the 3 allele of marker rs16902094 being in the haplotype, and is equivalent to “rs16902094 allele 3” and “rs16902094-3”. Furthermore, allelic codes in haplotypes are as for individual markers, i.e. 1=A, 2=C, 3=G and 4=T.

[0052] The term “susceptibility”, as described herein, refers to the proneness of an individual towards the development of a certain state (e.g., a certain trait, phenotype or disease), or towards being less able to resist a particular state than the average individual. The term encompasses both increased susceptibility and decreased susceptibility. Thus, particular alleles at polymorphic markers and/or haplotypes of the invention as described herein may be characteristic of increased susceptibility (i.e., increased risk) of prostate cancer, as characterized by a relative risk (RR) or odds ratio (OR) of greater than one for the particular allele or haplotype. Alternatively, the markers and/or haplotypes of the invention are characteristic of decreased susceptibility (i.e., decreased risk) of prostate cancer, as characterized by a relative risk of less than one.

[0053] The term “and/or” shall in the present context be understood to indicate that either or both of the items connected by it are involved. In other words, the term herein shall be taken to mean “one or the other or both”.

[0054] The term “look-up table”, as described herein, is a table that correlates one form of data to another form, or one or more forms of data to a predicted outcome to which the data is relevant, such as phenotype or trait. For example, a look-up table can comprise a correlation between allelic data for at least one polymorphic marker and a particular trait or phenotype, such as a particular disease diagnosis, that an individual who comprises the particular allelic data is likely to display, or is more likely to display than individuals who do not comprise the particular allelic data. Look-up tables can be multidimensional, i.e. they can contain information about multiple alleles for single markers simultaneously, or they can contain information about multiple markers, and they may also comprise other factors, such as particulars about diseases diagnoses, racial information, biomarkers, biochemical measurements, therapeutic methods or drugs, etc.

[0055] A “computer-readable medium”, is an information storage medium that can be accessed by a computer using a commercially available or custom-made interface. Exemplary computer-readable media include memory (e.g., RAM, ROM, flash memory, etc.), optical storage media (e.g., CD-ROM), magnetic storage media (e.g., computer hard drives, floppy disks, etc.), punch cards, or other commercially available media. Information may be transferred between a system of interest and a medium, between computers, or between computers and the computer-readable medium for storage or access of stored information. Such transmission can be electrical, or by other available methods, such as IR links, wireless connections, etc.

[0056] A “nucleic acid sample” as described herein, refers to a sample obtained from an individual that contains nucleic acid (DNA or RNA). In certain embodiments, i.e. the detection of specific polymorphic markers and/or haplotypes, the nucleic acid sample comprises genomic DNA. Such a nucleic acid sample can be obtained from any source that contains genomic DNA, including a blood sample, sample of amniotic fluid, sample of cerebrospinal fluid, or tissue sample from skin, muscle, buccal or conjunctival mucosa, placenta, gastrointestinal tract or other organs.

[0057] The term “prostate cancer therapeutic agent” refers to an agent that can be used to ameliorate or prevent symptoms associated with prostate cancer.

[0058] The term “prostate cancer-associated nucleic acid”, as described herein, refers to a nucleic acid that has been found to be associated to prostate cancer. This includes, but is not limited to, the markers and haplotypes described herein and markers and haplotypes in strong linkage disequilibrium (LD) therewith. In one embodiment, a prostate cancer-associated nucleic acid refers to an LD-block found to be associated with Type 2 diabetes through at least one polymorphic marker located within the LD block.

[0059] The term “antisense agent” or “antisense oligonucleotide” refers, as described herein, to molecules, or compositions comprising molecules, which include a sequence of purine an pyrimidine heterocyclic bases, supported by a backbone, which are effective to hydrogen bond to a corresponding contiguous bases in a target nucleic acid sequence. The backbone is composed of subunit backbone moieties supporting the purine an pyrimidine heterocyclic bases at positions which allow such hydrogen bonding. These backbone moieties are cyclic moieties of 5 to 7 atoms in size, linked together by phosphorous-containing linkage units of one to three atoms in length. In certain preferred embodiments, the antisense agent comprises an oligonucleotide molecule.

[0060] The term “LD Block C19”, as described herein, refers to the Linkage Disequilibrium (LD) block on Chromosome 19 between markers rs8110367 and rs2304150, corresponding to positions 43,170,305-43,647,423 of NCBI (National Center for Biotechnology Information) Build 36. “LD Block C03”, as described herein, refers to the Linkage Disequilibrium (LD) block on Chromosome 3 between markers rs497-4416 and rs2659698, corresponding to positions 129,060,479-129,709,054 of NCBI (National Center for Biotechnology Information) Build 36. The term “LD Block C08A”, as described herein, refers to the Linkage Disequilibrium (LD) block on Chromosome 8 between markers rs1840709 and rs731900, corresponding to positions 128,168,637-128,459,842 of NCBI (National Center for Biotechnology Information) Build 36. The term “LD Block C08B”, as described herein, refers to the Linkage Disequilibrium (LD) block on Chromosome 8 between markers rs13280181 and rs7015780, corresponding to positions 128,355,698-128,458,689 of NCBI (National Center for Biotechnology Information) Build 36.

### Assessment for Markers and Haplotypes

[0061] The genomic sequence within populations is not identical when individuals are compared. Rather, the genome exhibits sequence variability between individuals at many locations in the genome. Such variations in sequence are commonly referred to as polymorphisms, and there are many such sites within each genome. For example, the human genome exhibits sequence variations which occur on average every 500 base pairs. The most common sequence variant consists of base variations at a single base position in the genome, and such sequence variants, or polymorphisms, are commonly called Single Nucleotide Polymorphisms (“SNPs”). These SNPs are believed to have occurred in a single mutational event, and therefore there are usually two possible alleles possible at each SNPsite; the original allele and the mutated allele. Due to natural genetic drift and possibly also selective pressure, the original mutation has resulted in a polymorphism characterized by a particular frequency of its alleles in any given population. Many other types of sequence variants are found in the human genome, including mini- and microsatellites, and insertions, deletions and inversions (also called copy number variations (CNVs)). A polymorphic microsatellite has multiple small repeats of bases (such as CA repeats, TG on the complimentary strand) at a particular site in which the number of repeat lengths varies in the general population. In general terms, each version of the sequence with respect to the polymorphic site represents a specific allele of the polymorphic site. These sequence variants can all be referred to as polymorphisms, occurring at specific polymorphic sites characteristic of the sequence variant in question. In general terms, polymorphisms can comprise any number of specific alleles. Thus in one embodiment of the invention, the polymorphism is characterized by the presence of two or more alleles in any given population. In another embodiment, the polymorphism is characterized by the presence of three or more alleles. In other embodiments, the polymorphism is characterized by four or more alleles, five or more alleles, six or more alleles, seven or more alleles, nine or more alleles, or ten or more alleles. All such polymorphisms can be utilized in the methods and kits of the present invention, and are thus within the scope of the invention.

[0062] Due to their abundance, SNPs account for a majority of sequence variation in the human genome. Over 6 million SNPs have been validated to date (http://www.ncbi.nlm.nih.gov/projects/SNP/snp_summary.cgi). However, CNVs are receiving increased attention. These large-scale polymorphisms (typically 1 kb or larger) account for polymorphic variation affecting a substantial proportion of the assembled human genome; known CNVs covery over 15% of the human genome sequence (Estivill, X Armengol; L., PloS Genetics 3:1787-99 (2007). A http://projects.tcag.ca/variation/). Most of these polymorphisms are however very rare, and on average affect only a fraction of the genomic sequence of each individual. CNVs are known to affect gene expression, phenotypic variation and adaptation by disrupting gene dosage, and are also known to cause disease (microdeletion and microduplication disorders) and confer risk of common complex diseases, including HIV-1 infection and glomerulonephritis (Redon, R., et al. Nature 23:444-454 (2006)). It is thus possible that either previously described or unknown CNVs represent causative variants in linkage disequilibrium with the markers described herein to be associated with prostate cancer. Methods for detecting CNVs include comparative genomic hybridization (CGH) and genotyping, including use of genotyping arrays, as described by Carter (Nature Genetics 39:S16-S21 (2007)). The Database of Genomic Variants (http://projects.tcag.ca/variation/) contains updated information about the location, type and size of described CNVs. The database currently contains data for over 15,000 CNVs.

[0063] In some instances, reference is made to different alleles at a polymorphic site without choosing a reference allele. Alternatively, a reference sequence can be referred to for a particular polymorphic site. The reference allele is sometimes referred to as the “wild-type” allele and it usually is chosen as either the first sequenced allele or as the allele from a “non-affected” individual (e.g., an individual that does not display a trait or disease phenotype).

[0064] Alleles for SNP markers as referred to herein refer to the bases A, C, G or T as they occur at the polymorphic site in the SNP assay employed. The allele codes for SNPs used herein are as follows: 1=A, 2=C, 3=G, 4=T. The person skilled in the art will however realise that by assaying or reading the opposite DNA strand, the complementary allele can in each case be measured. Thus, for a polymorphic site (polymorphic marker) characterized by an A/G polymorphism, the assay employed may be designed to specifically detect the presence of one or both of the two bases possible, i.e. A and G. Alternatively, by designing an assay that is designed to detect the complimentary strand on the DNA template, the presence of the complementary bases T and C can be measured. Quantitatively (for example, in terms of risk estimates), identical results would be obtained from measurement of either DNA strand (+ strand or − strand).

[0065] Polymorphic markers (variants) can include changes that affect a polypeptide. Sequence differences, when compared to a reference nucleotide sequence, can include the insertion or deletion of a single nucleotide, or of more than one nucleotide, resulting in a frame shift; the change of at least one nucleotide, resulting in a change in the encoded amino acid; the change of at least one nucleotide, resulting in the generation of a premature stop codon; the deletion of several nucleotides, resulting in a deletion of one or more amino acids encoded by the nucleotides; the insertion of one or several nucleotides, such as by unequal recombination or gene conversion, resulting in an interruption of the coding sequence of a reading frame; duplication of all or a part of a sequence; transposition; or a rearrangement of a nucleotide sequence. Such sequence changes can alter the polypeptide encoded by the nucleic acid. For example, if the change in the nucleic acid sequence causes a frame shift, the frame shift can result in a change in the encoded amino acids, and/or can result in the generation of a premature stop codon, causing generation of a truncated polypeptide. Alternatively, a polymorphism associated with a disease or trait can be a synonymous change in one or more nucleotides (i.e., a change that does not result in a change in the amino acid sequence). Such a polymorphism can, for example, alter splice sites, affect the stability or transport of mRNA, or otherwise affect the transcription or translation of an encoded polypeptide. It can also alter DNA to increase the possibility that structural changes, such as amplifications or deletions, occur at the somatic level.

[0066] A haplotype refers to a segment of DNA that is characterized by a specific combination of alleles arranged along the segment. For diploid organisms such as humans, a haplotype comprises one member of the pair of alleles for each polymorphic marker or locus. In a certain embodiment, the haplotype can comprise two or more alleles, three or more alleles, four or more alleles, or five or more alleles, each allele corresponding to a specific polymorphic marker along the segment. Haplotypes can comprise a combination of various polymorphic markers, e.g., SNPs and microsatellites, having particular alleles at the polymorphic sites. The haplotypes thus comprise a combination of alleles at various genetic markers.

[0067] Detecting specific polymorphic markers and/or haplotypes can be accomplished by methods known in the art for detecting sequences at polymorphic sites. For example, standard techniques for genotyping for the presence of SNPs and/or microsatellite markers can be used, such as fluorescence-based techniques (e.g., Chen, X. et al., Genome Res. 9(5): 492-98 (1999); Kutyavin et al., Nucleic Acid Res. 34:e128 (2006)), utilizing PCR, LCR, Nested PCR and other techniques for nucleic acid amplification. Specific commercial methodologies available for SNP genotyping include, but are not limited to, TaqMan genotyping assays and SNPlex platforms (Applied Biosystems), gel electrophoresis (Applied Biosystems), mass spectrometry (e.g., MassARRAY system from Sequenom), minisequencing methods, real-time PCR, Bio-Plex system (BioRad), CEQ and SNPstream systems (Beckman), array hybridization technology (e.g., Affymetrix GeneChip; Perlegen), BeadArray Technologies (e.g., Illumina GoldenGate and Infinium assays), array tag technology (e.g., Parallele), and endonuclease-based fluorescence hybridization technology (Invader; Third Wave). Some of the available array platforms, including Affymetrix SNP Array 6.0 and Illumina CNV370-Duo and 1M BeadChips, include SNPs that tag certain CNVs. This allows detection of CNVs via surrogate SNPs included in these platforms. Thus, by use of these or other methods available to the person skilled in the art, one or more alleles at polymorphic markers, including microsatellites, SNPs or other types of polymorphic markers, can be identified.

### Linkage Disequilibrium

[0068] The natural phenomenon of recombination, which occurs on average once for each chromosomal pair during each meiotic event, represents one way in which nature provides variations in sequence (and biological function by consequence). It has been discovered that recombination does not occur randomly in the genome; rather, there are large variations in the frequency of recombination rates, resulting in small regions of high recombination frequency (also called recombination hotspots) and larger regions of low recombination frequency, which are commonly referred to as Linkage Disequilibrium (LD) blocks (Myers, S. et al., Biochem Soc Trans 34:526-530 (2006); Jeffreys, A. J., et al., Nature Genet 29:217-222 (2001); May, C. A., et al., Nature Genet 31:272-275 (2002)).

[0069] Linkage Disequilibrium (LD) refers to a non-random assortment of two genetic elements. For example, if a particular genetic element (e.g., an allele of a polymorphic marker, or a haplotype) occurs in a population at a frequency of 0.50 (50%) and another element occurs at a frequency of 0.50 (50%), then the predicted occurrance of a person's having both elements is 0.25 (25%), assuming a random distribution of the elements. However, if it is discovered that the two elements occur together at a frequency higher than 0.25, then the elements are said to be in linkage disequilibrium, since they tend to be inherited together at a higher rate than what their independent frequencies of occurrence (e.g., allele or haplotype frequencies) would predict. Roughly speaking, LD is generally correlated with the frequency of recombination events between the two elements. Allele or haplotype frequencies can be determined in a population by genotyping individuals in a population and determining the frequency of the occurence of each allele or haplotype in the population. For populations of diploids, e.g., human populations, individuals will typically have two alleles or allelic combinations for each genetic element (e.g., a marker, haplotype or gene).

[0070] Many different measures have been proposed for assessing the strength of linkage disequilibrium (LD; reviewed in Devlin, B. & Risch, N., Genomics 29:311-22 (1995))). Most capture the strength of association between pairs of biallelic sites. Two important pairwise measures of LD are r² (sometimes denoted Δ²) and |D′| (Lewontin, R., Genetics 49:49-67 (1964); Hill, W. G. & Robertson, A. Theor. Appl. Genet. 22:226-231 (1968)). Both measures range from 0 (no disequilibrium) to 1 (‘complete’ disequilibrium), but their interpretation is slightly different. |D′| is defined in such a way that it is equal to 1 if just two or three of the possible haplotypes are present, and it is <1 if all four possible haplotypes are present. Therefore, a value of |D′| that is <1 indicates that historical recombination may have occurred between two sites (recurrent mutation can also cause |D′| to be <1, but for single nucleotide polymorphisms (SNPs) this is usually regarded as being less likely than recombination). The measure r² represents the statistical correlation between two sites, and takes the value of 1 if only two haplotypes are present.

[0071] The r² measure is arguably the most relevant measure for association mapping, because there is a simple inverse relationship between r² and the sample size required to detect association between susceptibility loci and SNPs. These measures are defined for pairs of sites, but for some applications a determination of how strong LD is across an entire region that contains many polymorphic sites might be desirable (e.g., testing whether the strength of LD differs significantly among loci or across populations, or whether there is more or less LD in a region than predicted under a particular model). Measuring LD across a region is not straightforward, but one approach is to use the measure r, which was developed in population genetics. Roughly speaking, r measures how much recombination would be required under a particular population model to generate the LD that is seen in the data. This type of method can potentially also provide a statistically rigorous approach to the problem of determining whether LD data provide evidence for the presence of recombination hotspots. For the methods described herein, a significant r² value can be at least 0.1 such as at least 0.1, 0.15, 0.2, 0.25, 0.3, 0.35, 0.4, 0.45, 0.5, 0.55, 0.6, 0.65, 0.7, 0.75, 0.8, 0.85, 0.9, 0.91, 0.92, 0.93, 0.94, 0.95, 0.96, 0.97, 0.98, or at least 0.99. In one preferred embodiment, the significant r² value can be at least 0.2. Alternatively, linkage disequilibrium as described herein, refers to linkage disequilibrium characterized by values of |D′| of at least 0.2, such as 0.3, 0.4, 0.5, 0.6, 0.7, 0.8, 0.85, 0.9, 0.95, 0.96, 0.97, 0.98, or at least 0.99. Thus, linkage disequilibrium represents a correlation between alleles of distinct markers. It is measured by correlation coefficient or |D′| (r² up to 1.0 and |D′| up to 1.0). In certain embodiments, linkage disequilibrium is defined in terms of values for both the r² and |D′| measures. In one such embodiment, a significant linkage disequilibrium is defined as r²>0.1 and |D′|>0.8. In another embodiment, a significant linkage disequilibrium is defined as r²>0.2 and |D′|>0.9. Other combinations and permutations of values of r² and |D′| for determining linkage disequilibrium are also contemplated, and are also within the scope of the invention. Linkage disequilibrium can be determined in a single human population, as defined herein, or it can be determined in a collection of samples comprising individuals from more than one human population. In one embodiment of the invention, LD is determined in a sample from one or more of the HapMap populations (caucasian, african, japanese, chinese), as defined (http://www.hapmap.org). In one such embodiment, LD is determined in the CEU population of the HapMap samples. In another embodiment, LD is determined in the YRI population. In yet another embodiment, LD is determined in samples from the Icelandic population.

[0072] If all polymorphisms in the genome were independent at the population level (i.e., no LD), then every single one of them would need to be investigated in association studies, to assess all the different polymorphic states. However, due to linkage disequilibrium between polymorphisms, tightly linked polymorphisms are strongly correlated, which reduces the number of polymorphisms that need to be investigated in an association study to observe a significant association. Another consequence of LD is that many polymorphisms may give an association signal due to the fact that these polymorphisms are strongly correlated.

[0073] Genomic LD maps have been generated across the genome, and such LD maps have been proposed to serve as framework for mapping disease-genes (Risch, N. & Merkiangas, K, Science 273:1516-1517 (1996); Maniatis, N., et al., Proc Natl Acad Sci USA 99:2228-2233 (2002); Reich, D E et al, Nature 411:199-204 (2001)).

[0074] It is now established that many portions of the human genome can be broken into series of discrete haplotype blocks containing a few common haplotypes; for these blocks, linkage disequilibrium data provides little evidence indicating recombination (see, e.g., Wall., J. D. and Pritchard, J. K., Nature Reviews Genetics 4:587-597 (2003); Daly, M. et al., Nature Genet. 29:229-232 (2001); Gabriel, S. B. et al., Science 296:2225-2229 (2002); Patil, N. et al., Science 294:1719-1723 (2001); Dawson, E. et al., Nature 418:544-548 (2002); Phillips, M. S. et al., Nature Genet. 33:382-387 (2003)).

[0075] There are two main methods for defining these haplotype blocks: blocks can be defined as regions of DNA that have limited haplotype diversity (see, e.g., Daly, M. et al., Nature Genet. 29:229-232 (2001); Patil, N. et al., Science 294:1719-1723 (2001); Dawson, E. et al., Nature 418:544-548 (2002); Zhang, K. et al., Proc. Natl. Acad. Sci. USA 99:7335-7339 (2002)), or as regions between transition zones having extensive historical recombination, identified using linkage disequilibrium (see, e.g., Gabriel, S. B. et al., Science 296:2225-2229 (2002); Phillips, M. S. et al., Nature Genet. 33:382-387 (2003); Wang, N. et al., Am. J. Hum. Genet. 71:1227-1234 (2002); Stumpf, M. P., and Goldstein, D. B., Curr. Biol. 13:1-8 (2003)). More recently, a fine-scale map of recombination rates and corresponding hotspots across the human genome has been generated (Myers, S., et al., Science 310:321-32324 (2005); Myers, S. et al., Biochem Soc Trans 34:526530 (2006)). The map reveals the enormous variation in recombination across the genome, with recombination rates as high as 10-60 cM/Mb in hotspots, while closer to 0 in intervening regions, which thus represent regions of limited haplotype diversity and high LD. The map can therefore be used to define haplotype blocks/LD blocks as regions flanked by recombination hotspots. As used herein, the terms “haplotype block” or “LD block” includes blocks defined by any of the above described characteristics, or other alternative methods used by the person skilled in the art to define such regions.

[0076] Haplotype blocks (LD blocks) can be used to map associations between phenotype and haplotype status, using single markers or haplotypes comprising a plurality of markers. The main haplotypes can be identified in each haplotype block, and then a set of “tagging” SNPs or markers (the smallest set of SNPs or markers needed to distinguish among the haplotypes) can then be identified. These tagging SNPs or markers can then be used in assessment of samples from groups of individuals, in order to identify association between phenotype and haplotype. If desired, neighboring haplotype blocks can be assessed concurrently, as there may also exist linkage disequilibrium among the haplotype blocks.

[0077] It has thus become apparent that for any given observed association to a polymorphic marker in the genome, it is likely that additional markers in the genome also show association. This is a natural consequence of the uneven distribution of LD across the genome, as observed by the large variation in recombination rates. The markers used to detect association thus in a sense represent “tags” for a genomic region (i.e., a haplotype block or LD block) that is associating with a given disease or trait, and as such are useful for use in the methods and kits of the present invention. One or more causative (functional) variants or mutations may reside within the region found to be associating to the disease or trait. The functional variant may be another SNP, a tandem repeat polymorphism (such as a minisatellite or a microsatellite), a transposable element, or a copy number variation, such as an inversion, deletion or insertion. Such variants in LD with the variants described herein may confer a higher relative risk (RR) or odds ratio (OR) than observed for the tagging markers used to detect the association. The present invention thus refers to the markers used for detecting association to the disease, as described herein, as well as markers in linkage disequilibrium with the markers. Thus, in certain embodiments of the invention, markers that are in LD with the markers and/or haplotypes of the invention, as described herein, may be used as surrogate markers. The surrogate markers have in one embodiment relative risk (RR) and/or odds ratio (OR) values smaller than for the markers or haplotypes initially found to be associating with the disease, as described herein. In other embodiments, the surrogate markers have RR or OR values greater than those initially determined for the markers initially found to be associating with the disease, as described herein. An example of such an embodiment would be a rare, or relatively rare (such as <10% allelic population frequency) variant in LD with a more common variant (>10% population frequency) initially found to be associating with the disease, such as the variants described herein. Identifying and using such markers for detecting the association discovered by the inventors as described herein can be performed by routine methods well known to the person skilled in the art, and are therefore within the scope of the present invention.

### Determination of Haplotype Frequency

[0078] The frequencies of haplotypes in patient and control groups can be estimated using an expectation-maximization algorithm (Dempster A. et al., J. R. Stat. Soc. B, 39:1-38 (1977)). An implementation of this algorithm that can handle missing genotypes and uncertainty with the phase can be used. Under the null hypothesis, the patients and the controls are assumed to have identical frequencies. Using a likelihood approach, an alternative hypothesis is tested, where a candidate at-risk-haplotype, which can include the markers described herein, is allowed to have a higher frequency in patients than controls, while the ratios of the frequencies of other haplotypes are assumed to be the same in both groups. Likelihoods are maximized separately under both hypotheses and a corresponding 1-df likelihood ratio statistic is used to evaluate the statistical significance.

[0079] To look for at-risk and protective markers and haplotypes within a susceptibility region, for example within an LD block, association of all possible combinations of genotyped markers within the region is studied. The combined patient and control groups can be randomly divided into two sets, equal in size to the original group of patients and controls. The marker and haplotype analysis is then repeated and the most significant p-value registered is determined. This randomization scheme can be repeated, for example, over 100 times to construct an empirical distribution of p-values. In a preferred embodiment, a p-value of <0.05 is indicative of a significant marker and/or haplotype association.

[0080] One general approach to haplotype analysis involves using likelihood-based inference applied to NEsted MOdels (Gretarsdottir S., et al., Nat. Genet. 35:131-38 (2003)). The method is implemented in the program NEMO, which allows for many polymorphic markers, SNPs and microsatellites. The method and software are specifically designed for case-control studies where the purpose is to identify haplotype groups that confer different risks. It is also a tool for studying LD structures. In NEMO, maximum likelihood estimates, likelihood ratios and p-values are calculated directly, with the aid of the EM algorithm, for the observed data treating it as a missing-data problem.

[0081] Even though likelihood ratio tests based on likelihoods computed directly for the observed data, which have captured the information loss due to uncertainty in phase and missing genotypes, can be relied on to give valid p-values, it would still be of interest to know how much information had been lost due to the information being incomplete. The information measure for haplotype analysis is described in Nicolae and Kong (Technical Report 537, Department of Statistics, University of Statistics, University of Chicago; Biometrics, 60(2):368-75 (2004)) as a natural extension of information measures defined for linkage analysis, and is implemented in NEMO.

### Statistical Analysis

[0082] For single marker association to a disease, the Fisher exact test can be used to calculate two-sided p-values for each individual allele. Usually, all p-values are presented unadjusted for multiple comparisons unless specifically indicated. The presented frequencies (for microsatellites, SNPs and haplotypes) are allelic frequencies as opposed to carrier frequencies. To minimize any bias due the relatedness of the patients who were recruited as families to the study, first and second-degree relatives can be eliminated from the patient list. Furthermore, the test can be repeated for association correcting for any remaining relatedness among the patients, by extending a variance adjustment procedure previously described (Risch, N. & Teng, J. Genome Res., 8:1273-1288 (1998)) for sibships so that it can be applied to general familial relationships, and present both adjusted and unadjusted p-values for comparison. The method of genomic controls (Devlin, B. & Roeder, K. Biometrics 55:997 (1999)) can also be used to adjust for the relatedness of the individuals and possible stratification. The differences are in general very small as expected. To assess the significance of single-marker association corrected for multiple testing we can carry out a randomization test using the same genotype data. Cohorts of patients and controls can be randomized and the association analysis redone multiple times (e.g., up to 500,000 times) and the p-value is the fraction of replications that produced a p-value for some marker allele that is lower than or equal to the p-value we observed using the original patient and control cohorts.

[0083] For both single-marker and haplotype analyses, relative risk (RR) and the population attributable risk (PAR) can be calculated assuming a multiplicative model (haplotype relative risk model) (Terwilliger, J. D. & Ott, J., Hum. Hered. 42:337-46 (1992) and Falk, C. T. & Rubinstein, P, Ann. Hum. Genet. 51 (Pt 3):227-33 (1987)), i.e., that the risks of the two alleles/haplotypes a person carries multiply. For example, if RR is the risk of A relative to a, then the risk of a person homozygote AA will be RR times that of a heterozygote Aa and RR² times that of a homozygote aa. The multiplicative model has a nice property that simplifies analysis and computations—haplotypes are independent, i.e., in Hardy-Weinberg equilibrium, within the affected population as well as within the control population. As a consequence, haplotype counts of the affecteds and controls each have multinomial distributions, but with different haplotype frequencies under the alternative hypothesis. Specifically, for two haplotypes, hᵢ and hⱼ, risk(hᵢ)/risk(hⱼ)=(fᵢ/pᵢ)/(fⱼ/pⱼ), where f and p denote, respectively, frequencies in the affected population and in the control population. While there is some power loss if the true model is not multiplicative, the loss tends to be mild except for extreme cases. Most importantly, p-values are always valid since they are computed with respect to null hypothesis.

[0084] An association signal detected in one association study may be replicated in a second cohort, ideally from a different population (e.g., different region of same country, or a different country) of the same or different ethnicity. The advantage of replication studies is that the number of tests performed in the replication study is usually quite small, and hence the less stringent the statistical measure that needs to be applied. For example, for a genome-wide search for susceptibility variants for a particular disease or trait using 300,000 SNPs, a correction for the 300,000 tests performed (one for each SNP) can be performed. Since many SNPs on the arrays typically used are correlated (i.e., in LD), they are not independent. Thus, the correction is conservative. Nevertheless, applying this correction factor requires an observed P-value of less than 0.05/300,000=1.7×10⁻⁷ for the signal to be considered significant applying this conservative test on results from a single study cohort. Obviously, signals found in a genome-wide association study with P-values less than this conservative threshold are a measure of a true genetic effect, and replication in additional cohorts is not necessarily from a statistical point of view. Importantly, however, signals with P-values that are greater than this threshold may also be due to a true genetic effect. Thus, since the correction factor depends on the number of statistical tests performed, if one signal (one SNP) from an initial study is replicated in a second case-control cohort, the appropriate statistical test for significance is that for a single statistical test, i.e., P-value less than 0.05. Replication studies in one or even several additional case-control cohorts have the added advantage of providing assessment of the association signal in additional populations, thus simultaneously confirming the initial finding and providing an assessment of the overall significance of the genetic variant(s) being tested in human populations in general.

[0085] The results from several case-control cohorts can also be combined to provide an overall assessment of the underlying effect. The methodology commonly used to combine results from multiple genetic association studies is the Mantel-Haenszel model (Mantel and Haenszel, J Natl Cancer Inst 22:719-48 (1959)). The model is designed to deal with the situation where association results from different populations, with each possibly having a different population frequency of the genetic variant, are combined. The model combines the results assuming that the effect of the variant on the risk of the disease, a measured by the OR or RR, is the same in all populations, while the frequency of the variant may differ between the populations. Combining the results from several populations has the added advantage that the overall power to detect a real underlying association signal is increased, due to the increased statistical power provided by the combined cohorts. Furthermore, any deficiencies in individual studies, for example due to unequal matching of cases and controls or population stratification will tend to balance out when results from multiple cohorts are combined, again providing a better estimate of the true underlying genetic effect.

### Methods of Determining Susceptibility to Prostate Cancer

[0086] It has been shown for the first time that certain polymorphic variants on chromosome 3q21.3, chromosome 8q24.21 and chromosome 19q13.2 are associated with risk of developing prostate cancer. Certain alleles of certain polymorphic markers have been found to be present at increased frequency in individuals with diagnosis of prostate cancer compared with controls. These polymorphic markers are thus associated with risk of prostate cancer. Without intending to being bound to a particular theory, the particular polymorphic markers described herein, as well as markers in linkage disequilibrium with these polymorphic markers, are contemplated to be useful as markers for determining susceptibility to prostate cancer. These markers are believed to be useful in a range of diagnostic applications, as described further herein.

[0087] Association on 3q21.3 is in a region that contains several genes. For example, SNP rs10934853 is located in the fourth intron of the EEFSEC gene, which is an elongation factor required for effective selenoprotein translation. Other RefSeq genes in the same LD region (LD Block C03) are SEC61A1 and RUVBL1. None of these genes has previously been directly implicated in prostate cancer. On 19q13.2, association is found in a LD-region (LD Block C19) with several annotated RefSeq genes. One of these is PPP1R14A, a gene reported to be an inhibitor of smooth muscle myosin phosphatase.

[0088] Based on a genome-wide SNP association study and a follow up study on prostate cancer, four variants, and their correlated surrogate variants, were shown to be associated with the disease in European populations; rs10934853 (SEQ ID NO: 1) on 3q21.3, rs16902094 (SEQ ID NO: 2), rs16902104 (SEQ ID NO:287) and rs445114 (SEQ ID NO: 3) on 8q24.21 and rs8102476 (SEQ ID NO: 4) on 19q13.2. For these markers, the risk alleles rs10934853-A, rs16902094-G, rs16902104-T and rs445114-T on 8q24.21 and rs8102476-C on 19q13.2 were found, with OR values ranging from 1.12 to 1.21 and all with P-values of association with prostate cancer less than 5×10⁻¹⁰. Exemplary surrogate variants (surrogate markers) of these variants are shown in Tables 8-11 and 17-20 herein.

[0089] Accordingly, in one aspect the invention provides a method of determining a susceptibility to prostate cancer, the method comprising obtaining nucleic acid sequence data about a human individual identifying at least one allele of at least one polymorphic marker, wherein different alleles of the at least one polymorphic marker are associated with different susceptibilities to prostate cancer in humans, and determining a susceptibility to prostate cancer from the nucleic acid sequence data, wherein the at least one polymorphic marker is selected from the group consisting of rs16902094, rs8102476, rs10934853 and rs445114, and markers in linkage disequilibirium therewith. Nucleic acid sequence data identifying particular alleles of polymorphic markers is sometimes also referred to as genotype data. In one embodiment, nucleic acid sequence data is obtained from a biological sample from the individual.

[0090] Nucleic acid sequence data can be obtained for example by analyzing sequence of the at least one polymorphic marker in a biological sample from the individual. Alternatively, nucleic acid sequence data can be obtained in a genotype dataset from the human individual and analyzing sequence of the at least one polymorphic marker in the dataset. Such analysis in certain embodiments comprises determining the presence or absence of a particular allele of specific polymorphic markers.

[0091] In certain embodiments, the method comprises steps of (i) obtaining a nucleic acid sample from an individual; (ii) determine the nucleic acid sequence of at least one polymorphic marker in the nucleic acid sample; and (iii) determine a susceptibility to prostate cancer from the nucleic acid sequence of the at least one polymorphic marker.

[0092] In certain embodiments, the markers in linkage disequilibrium with rs8102476 are selected from the group consisting of rs8102476, rs8110367, rs10500278, rs705503, rs1654338, rs4803899, rs1036233, rs7246060, rs8102476, rs12976534, rs4803934, rs11668070, rs7250689, rs7253245, rs3786870, rs3786872, rs3786877, rs12610791, rs8101725, rs870218, rs12611009, rs3826896, rs8104823, rs1821284, rs4802327, rs11672219, rs3816044, rs2304177, rs4312417, rs3178327, rs3900981, rs3843754, rs2302182, rs1052375, rs12609246, rs3745843, rs3745844, and rs2304150, which are the markers listed in Table 11. In certain embodiments, markers in linkage disequilibrium with rs10934853 are selected from the group consisting of rs10934853, rs4974416, rs13095214, rs11923862, rs1543272, rs6439086, rs7644239, rs7625264, rs11921463, rs13080277, rs11926127, rs7649674, rs7616277, rs6439094, rs16838982, rs2053016, rs17203687, rs16845806, rs7630727, rs1549876, rs17282209, rs6439104, rs1469659, rs7611430, rs6770337, rs6777095, rs4602341, rs4857833, rs6439108, rs6764517, rs981447, rs981446, rs1469658, rs2335772, rs1030656, rs1030655, rs2335771, rs759945, rs2075402, rs1554534, rs3732402, rs13091198, rs11714052, rs6439113, rs6787614, rs11720239, rs11715661, rs7641133, rs11924142, rs7650365, rs6788879, rs6439115, rs4857836, rs4857837, rs11707462, rs9821568, rs6784159, rs2811475, rs13095660, rs6439116, rs6414310, rs2955102, rs11920225, rs11709066, rs11716941, rs2811472, rs13077913, rs13077790, rs2811473, rs2687728, rs10934850, rs872267, rs2687731, rs3122174, rs2999051, rs13067650, rs2248668, rs2955121, rs11706455, rs2999052, rs11715394, rs2687729, rs2811478, rs2999060, rs2999056, rs2955123, rs2811517, rs2811516, rs2811515, rs2811514, rs2811512, rs2811511, rs883238, rs940061, rs2811510, rs2811483, rs2811484, rs2687730, rs2811509, rs2492285, rs2687720, rs2811508, rs2811486, rs6439119, rs2955125, rs2955126, rs2955127, rs4293718, rs2955129, rs7374072, rs2999090, rs7372439, rs4857871, rs4857872, rs4857873, rs6770140, rs4384971, rs2999089, rs6439121, rs2254379, rs2955130, rs9814834, rs2955132, rs9845651, rs6439122, rs9873786, rs4857838, rs6775988, rs9830294, rs4857877, rs2999086, rs2999085, rs2999084, rs2999083, rs2999081, rs2999079, rs4074440, rs2955077, rs9843281, rs2999073, rs2955085, rs2999072, rs13434079, rs2955088, rs2999070, rs17343355, rs2955090, rs2955091, rs2999069, rs2955092, rs2955094, rs2955095, rs2955096, rs2999068, rs2999067, rs2955099, rs2999066, rs2999065, rs2811545, rs2999035, rs2811544, rs2811543, rs2811541, rs2811540, rs2811539, rs2811538, rs2811396, rs2811400, rs2811537, rs2999064, rs2811536, rs2811534, rs2811413, rs2811415, rs2811533, rs2811416, rs2811532, rs2811531, rs2955100, rs2999061, rs2811529, rs2811527, rs2811373, rs2811525, rs7374952, rs7374227, rs4593050, rs6439124, rs7373998, rs2955101, rs2811519, rs2811518, rs2955103, rs2811388, rs2999036, rs2811390, rs2811391, rs2811393, rs2037965, rs2811397, rs6805582, rs6805621, rs6794591, rs16843876, rs11706852, rs11706826, rs11706908, rs6771646, rs13095166, rs10934853, rs12486127, rs12486156, rs11708733, rs6772407, rs4857841, rs11710704, rs16844002, rs6798749, rs1735558, rs4857879, rs11721213, rs1735549, rs1735546, rs12632366, rs1735545, rs1702122, rs1108313, rs1735538, rs1702119, rs1702118, rs3021461, rs2977565, rs2293947, rs741925, rs729847, rs1702134, rs1620440, rs7632169, rs1735527, rs760383, rs11705709, rs11705891, rs2999031, rs6780368, rs2659685, rs11715947, rs1735537, rs11717030, rs2977564, rs2939820, rs3828417, rs4527399, rs4521245, rs1806462, rs2860228, rs9851497, rs6789646, rs7629791, rs2713576, and rs2659698, which are the markers listed in Table 8. In certain embodiments, markers in linkage disequilibrium with rs16902094 are selected from the group consisting of rs16902094, rs1840709, rs3857883, rs1456316, rs1456315, rs7006409, rs4871775, rs4871779, rs13251915, rs283720, rs283704, rs283705, SG08S1723, rs453875, SG08S1738, rs11785664, rs622556, rs452529, rs400818, rs386883, rs377649, rs432470, rs424281, rs16902103, rs16902104, rs1668875, rs7002712, rs587948, rs623401, rs16902118, rs10095860, rs16902121, rs13256275, rs11785277, rs11774827, rs11782693, rs11782700, rs11782735, rs11783559, rs11783615, rs11784125, rs11776260, rs11774907, rs16902127, rs7015780, and rs731900, which are the markers listed in Table 9. In certain embodiments, markers in linkage disequilibrium with rs445114 are selected from the group consisting of rs13280181, rs12707923, rs6984900, rs17450865, rs7822551, rs12549518, rs6996866, rs2007197, rs283727, rs283728, rs283704, rs283705, rs10107982, rs453875, rs445114, rs11785664, rs622556, rs452529, rs13256367, rs10956356, rs10956358, rs7008928, rs7009077, rs400818, rs386883, rs377649, rs432470, rs424281, rs1668875, rs7002712, rs587948, rs623401, rs10956359, rs17464492, rs420101, rs7838714, rs389143, rs688201, rs687324, rs687279, rs436238, rs581761, rs673745, rs688937, rs672888, rs7826557, rs418269, rs385278, rs391640, rs670725, rs382824, rs383205, rs373616, rs13275275, rs13248140, rs10956361, rs10956362, rs13249993, rs11777532, rs10956363, rs4871782, rs10087810, rs12541832, rs13262406, rs10098985, rs13281615, rs13256275, rs13267780, rs10447995, rs7014657, rs7002826, rs7007568, rs7842494, rs5022926, rs9693995, rs2121629, rs978683, rs9283954, rs7831303, rs7815100, rs4143118, rs6988647, rs9693143, rs2060775, rs10956364, rs11776330, rs7845452, rs7815245, rs2121631, rs1562430, rs2392780, rs7015780, which are the markers listed in Table 10.

[0093] Further surrogate markers are provided in Tables 17-20 herein. Thus, in certain embodiments, markers in linkage disequilibrium with rs8102476 may also be selected from the group consisting of the markers listed in Table 20. Likewise, in certain embodiments, markers in linkage disequilibrium with rs10934853 may also be selected from the group consisting of the markers listed in Table 17; markers in linkage disequilibrium with rs16902094 may also be selected from the group consisting of the markers listed in Table 18; and markers in linkage disequilibrium with rs445114 are selected from the group consisting of the markers listed in Table 19.

[0094] Surrogate markers can be selected based on certain values of the linkage disequilibrium measures D′ and r², as described further herein. Markers that are in linkage disequilibrium with the markers rs16902094, rs10934853, rs445114 and rs8102476 are exemplified by the markers listed in Tables 8-11 and 17-20 herein, but the skilled person will appreciate that other markers in linkage disequilibrium with these markers may also be used in the diagnostic applications described herein. Further, the skilled person will appreciate that since linkage disequilibrium is a continuous measure, certain values of the LD measures D′ and r² may be suitably chosen to define markers that are useful as surrogate markers in LD with the markers described herein. The values of D′ and r² given in Tables 8-11 and 17-20 may in certain embodiments be used to define such marker subsets of the markers listed in the Tables 8-11 and Tables 17-20. In one such embodiment, suitable markers in linkage disequilibrium are correlated with the anchor marker by values of r² greater than 0.2. In another such embodiment, suitable markers in linkage disequilibrium are correlated with the anchor marker by values of r² greater than 0.5. In yet another such embodiment, suitable markers in linkage disequilibrium are correlated with the anchor marker by values of r² greater than 0.8. In one embodiment, suitable markers in linkage disequilibrium are correlated with the anchor marker by values of r² of 1.0. Such markers are perfect surrogates of the anchor marker, and will give identical association results, i.e. they provide identical genetic information.

[0095] Association data presented in Tables 13-16 (Example 2) show exemplary results of association of surrogate markers in an Iceland sample set. Surrogate markers give different association signals because they are in different linkage disequilibrium with the underlying signal. For example, for marker rs445114, the markers rs453875, rs13280181 and rs581761 give different association results. The strongest signal is observed for rs453875 (OR 1.20, P-value 6.1E-7), while weaker association is observed for rs13280181 (OR 1.15, P-value 0.002) and rs581761 (OR 1.05, P-value 0.14). All three are surrogates for rs445114, but capture the underlying association signal to a varying degree. It should also be noted that sample size has an effect of the power to detect an underlying association. Therefore, association values for a sample size of 1776 cases and 35675 controls, as shown in Table 14, are weaker than would have been obtained using the extended sample sets as shown in Table 1. This does not mean that the inherent value of each surrogate marker is affected, but is rather a manifestation of the relative strength of such markers in capturing the underlying association.

[0096] Accordingly, in certain embodiments, surrogate markers of rs10934853 are selected from the group consisting of the markers listed in Table 13. In certain embodiments, surrogate markers of rs445114 are selected from the group consisting of the markers listed in Table 14. In certain embodiments, surrogate markers of rs16902094 are selected from the group consisting of the markers listed in Table 15. In certain embodiments, surrogate markers of rs8102476 are selected from the group consisting of the markers listed in Table 16.

[0097] In one embodiment, surrogate markers of rs10934853 are selected from the group consisting of rs16845806, rs7630727, rs1549876, rs6439104, rs1469659, rs7611430, rs6770337, rs6777095, rs4602341, rs4857833, rs6439108, rs6764517, rs981447, rs981446, rs1469658, rs2335772, rs1030656, rs1030655, rs2335771, rs759945, rs2075402, rs1554534, rs3732402, rs6439113, rs7641133, rs11924142, rs7650365, rs6788879, rs6439115, rs4857836, rs4857837, rs9821568, rs2811475, rs6414310, rs2955102, rs11920225, rs2811472, rs2811473, rs2687728, rs872267, rs2687731, rs3122174, rs2999051, rs2248668, rs2955121, rs2999052, rs2687729, rs2999060, rs2999056, rs2955123, rs2811517, rs2811516, rs2811515, rs2811514, rs2811512, rs883238, rs940061, rs2811510, rs2811483, rs2811484, rs2811509, rs2492285, rs2687720, rs2811508, rs6439119, rs2955125, rs2955127, rs7374072, rs7372439, rs4857871, rs4857872, rs4857873, rs6770140, rs4384971, rs6439121, rs2254379, rs9814834, rs2955132, rs9845651, rs6439122, rs9873786, rs4857838, rs6775988, rs9830294, rs4857877, rs4074440, rs9843281, rs13434079, rs17343355, rs2999035, rs2999064, rs2811413, rs2811529, rs2955103, rs13095166, rs12486127, rs12486156, rs4857841, rs1735558, rs4857879, rs1735549, rs1735546, rs1735545, rs1702122, rs1735538, rs1702119, rs1702118, rs3021461, rs2977565, rs741925, rs729847, rs1702134, rs1620440, rs7632169, rs1735527, rs760383, rs6780368, rs2659685, rs1735537, and rs2977564.

[0098] In one embodiment, surrogate markers of rs445114 are selected from the group consisting of rs453875, rs10107982, rs13256367, rs1668875, rs587948, rs623401, rs10956359, rs17464492, rs7822551, rs17450865, rs2007197, rs6984900, rs12707923, rs13280181, rs13262081, rs620861, rs391640, and rs13267780.

[0099] In one embodiment, surrogate markers of rs16902094 are selected from the group consisting of rs16902103, rs13251915, rs453875, rs283720, rs1668875, rs587948, and rs623401.

[0100] In one embodiment, surrogate markers of rs445114 are selected from the group consisting of rs4803899, rs1036233, rs7246060, rs12976534, rs4803934, rs11668070, and rs7250689.

[0101] In preferred embodiments, the markers useful in the methods of the invention are selected from the group consisting of rs16902094, rs10934853, rs445114, rs8102476, rs620861 and rs16902104. In one preferred embodiment, the marker is rs8102476. In another preferred embodiment, the marker is rs10934853. In another preferred embodiment, the marker is rs16902094. In another preferred embodiment, the marker is rs445114. In another embodiment, the marker is rs620861. In another embodiment, the marker is rs16902104.

[0102] In certain embodiments of the invention, sequence data obtained about a polymorphic marker is amino acid sequence data. Polymorphic markers can result in alterations in the amino acid sequence of encoded polypeptide or protein sequence. In certain embodiments, the analysis of amino acid sequence data comprises determining the presence or absence of an amino acid substitution in the amino acid encoded by the at least one polymorphic marker. Sequence data can in certain embodiments be obtained by analyzing the amino acid sequence encoded by the at least one polymorphic marker in a biological sample obtained from the individual.

[0103] To define markers that are useful in diagnostic for determining a susceptibility to prostate cancer, it may be useful to compare the frequency of markers alleles in individuals with prostate cancer to their corresponding frequency in control individuals. In one embodiment, an increase in frequency of the at least one allele in the at least one polymorphism in individuals diagnosed with prostate cancer, as compared with the frequency of the at least one allele in the control group is indicative of the at least one allele being useful for assessing increased susceptibility to prostate cancer.

[0104] In another embodiment, a decrease in frequency of the at least one allele in the at least one polymorphism in individuals diagnosed with prostate cancer, as compared with the frequency of the at least one allele in the control sample is indicative of the at least one allele being useful for assessing decreased susceptibility to, or protection against, prostate cancer.

[0105] In general, sequence data can be obtained by analyzing a sample from an individual, or by analyzing information about specific markers in a genotype database. In certain embodiments, sequence data can be obtained through nucleic acid sequence information or amino acid sequence information from a preexisting record about a human individual. Such a preexisting record can be any documentation, database or other form of data storage containing such information.

[0106] Determination of a susceptibility or risk of a particular individual in general comprises comparison of the genotype information (sequence information about particular marker or a plurality of markers) to a record or database providing a correlation about particular polymorphic marker(s) and susceptibility to prostate cancer. Thus, in specific embodiments, determining a susceptibility comprises comparing the sequence data to a database containing correlation data between the at least one polymorphic marker and susceptibility to prostate cancer. In certain embodiments, the database comprises at least one measure of susceptibility to prostate cancer for the at least one polymorphic marker. In certain embodiments, the database comprises a look-up table comprising at least one measure of susceptibility to prostate cancer for the at least one polymorphic marker. Determination of susceptibility is based on sequence information about particular markers identifying particular alleles at those markers. A calculation of susceptibility (risk) of prostate cancer is performed based on the information, using risk measures that have been determined for the particular alleles or combination of alleles. The measure of susceptibility may in the form of relative risk (RR), absolute risk (AR), percentage (%) or other convenient measure for describing genetic susceptibility of individuals.

[0107] Certain embodiments of the invention relate to markers located within the LD Block C19, LD Block C03, LD Block C08A and/or LD Block C08B as defined herein. These LD Blocks contain markers that are associated with risk of prostate cancer, as shown herein. For example, LD Block C19 comprises markers in linkage disequilibrium with rs8102476, LD Block C03 comprises markers in linkage disequilibrium with rs10934853, LD Block C08A comprises markers in linkage disequilibrium with rs16902094 and LD Block C08B comprises markers in linkage disequilibrium with rs445114. It is however also contemplated that surrogate markers useful for determining susceptibility to prostate cancer may be located outside these blocks as defined in physical terms (genomic locations). Thus, other embodiments of the invention are not confined to markers located within the physical boundaries of the LD blocks as defined. Rather such embodiments relate to useful surrogate markers due to being in LD with one or more of the markers shown herein to be associated with risk of prostate cancer.

[0108] Another aspect of the invention relates to a method for determining a susceptibility to prostate cancer in a human individual, comprising determining the presence or absence of at least one allele of at least one polymorphic marker in a nucleic acid sample obtained from the individual, or in a genotype dataset from the individual, wherein the at least one polymorphic marker is selected from the group consisting of rs16902094, rs10934853, rs445114 and rs8102476, and markers in linkage disequilibrium therewith, and wherein determination of the presence of the at least one allele is indicative of a susceptibility to prostate cancer. Determination of the presence of an allele that correlates with prostate cancer is indicative of an increased susceptibility (increased risk) to prostate cancer. Individuals who are homozygous for such alleles are particularly susceptible to prostate cancer. On the other hand, individuals who do not carry such at-risk alleles are at a decreased susceptibility of developing prostate cancer. For SNPs, such individuals will be homozygous for the alternate (protective) allele of the polymorphism.

[0109] Determination of susceptibility is in some embodiments reported using non-carriers of the at-risk alleles of polymorphic markers as a reference. In certain embodiments, susceptibility is reported based on a comparison with the general population, e.g. compared with a random selection of individuals from the population. Such embodiments thus reflect the susceptibility (risk) of an individual compared with a randomly selected individual from the population.

[0110] In certain embodiments, polymorphic markers are detected by sequencing technologies. Obtaining sequence information about an individual identifies particular nucleotides in the context of a sequence. For SNPs, sequence information about a single unique sequence site is sufficient to identify alleles at that particular SNP. For markers comprising more than one nucleotide, sequence information about the genomic region of the individual that contains the polymorphic site identifies the alleles of the individual for the particular site. The sequence information can be obtained from a sample from the individual. In certain embodiments, the sample is a nucleic acid sample. In certain other embodiments, the sample is a protein sample.

[0111] Various methods for obtaining nucleic acid sequence are known to the skilled person, and all such methods are useful for practicing the invention. Sanger sequencing is a well-known method for generating nucleic acid sequence information. Recent methods for obtaining large amounts of sequence data have been developed, and such methods are also contemplated to be useful for obtaining sequence information. These include pyrosequencing technology (Ronaghi, M. et al. Anal Biochem 267:65-71 (1999); Ronaghi, et al. Biotechniques 25:876-878 (1998)), e.g. 454 pyrosequencing (Nyren, P., et al. Anal Biochem 208:171-175 (1993)), Illumina/Solexa sequencing technology (http://www.illumina.com; see also Strausberg, R L, et al Drug Disc Today 13:569-577 (2008)), and Supported Oligonucleotide Ligation and Detection Platform (SOLID) technology (Applied Biosystems, http://www.appliedbiosystems.com); Strausberg, R L, et al Drug Disc Today 13:569-577 (2008).

[0112] It is possible to impute or predict genotypes for un-genotyped relatives of genotyped individuals. For every un-genotyped case, it is possible to calculate the probability of the genotypes of its relatives given its four possible phased genotypes. In practice it may be preferable to include only the genotypes of the case's parents, children, siblings, half-siblings (and the half-sibling's parents), grand-parents, grand-children (and the grand-children's parents) and spouses. It will be assumed that the individuals in the small sub-pedigrees created around each case are not related through any path not included in the pedigree. It is also assumed that alleles that are not transmitted to the case have the same frequency—the population allele frequency. The probability of the genotypes of the case's relatives can then be computed by:

$$Pr ( genotypes of relatives ; θ ) = {\sum }_{h ∈ \{ AA , AG , GA , GG \}} Pr ( h ; θ ) Pr ( genotypes of relatives \vert h ) ,$$

where θ denotes the A allele's frequency in the cases. Assuming the genotypes of each set of relatives are independent, this allows us to write down a likelihood function for θ:

$$L ( θ ) = {\prod }_{i} Pr ( genotypes of relatives of case i ; θ ) . \qquad (* )$$

[0113] This assumption of independence is usually not correct. Accounting for the dependence between individuals is a difficult and potentially prohibitively expensive computational task. The likelihood function in (*) may be thought of as a pseudolikelihood approximation of the full likelihood function for θ which properly accounts for all dependencies. In general, the genotyped cases and controls in a case-control association study are not independent and applying the case-control method to related cases and controls is an analogous approximation. The method of genomic control (Devlin, B. et al., Nat Genet 36, 1129-30; author reply 1131 (2004)) has proven to be successful at adjusting case-control test statistics for relatedness. We therefore apply the method of genomic control to account for the dependence between the terms in our pseudolikelihood and produce a valid test statistic.

[0114] Fisher's information can be used to estimate the effective sample size of the part of the pseudolikelihood due to un-genotyped cases. Breaking the total Fisher information, I, into the part due to genotyped cases, I_{g}, and the part due to ungenotyped cases, Iᵤ, I=I_{g}+Iᵤ, and denoting the number of genotyped cases with N, the effective sample size due to the un-genotyped cases is estimated by

$$\frac{{I}_{u}}{{I}_{g}} N .$$

[0115] It is also possible to impute genotypes for markers with no genotype data. For example, using the IMPUTE software (Marchini, J. et al. Nat Genet 39:906-13 (2007)) and the HapMap CEU data (for example NCBI Build 36 (db126b)) as reference (Frazer, K. A., et al. Nature 449:851-61 (2007)) it is possible to impute ungenotyped markers. This can be useful for extending genotype coverage, if the CEU dataset has been genotyped.

[0116] In the present context, and individual who is at an increased susceptibility (i.e., increased risk) for prostate cancer, is an individual in whom at least one specific allele at one or more polymorphic marker or haplotype conferring increased susceptibility (increased risk) for prostate cancer is identified (i.e., at-risk marker alleles or haplotypes). The at-risk marker or haplotype is one that confers an increased risk (increased susceptibility) of prostate cancer. In one embodiment, significance associated with a marker or haplotype is measured by a relative risk (RR). In another embodiment, significance associated with a marker or haplotye is measured by an odds ratio (OR). In a further embodiment, the significance is measured by a percentage. In one embodiment, a significant increased risk is measured as a risk (relative risk and/or odds ratio) of at least 1.05, including but not limited to: at least 1.10, at least 1.11, at least 1.12, at least 1.13, at least 1.14, at least 1.15, at least 1.16, at least 1.17, at least 1.18, at least 1.19, at least 1.20, at least 1.30, at least 1.40, at least 1.50, at least 1.60, at least 1.70, at least 1.80, at least 1.90, and at least 2.0. In a particular embodiment, a risk (relative risk and/or odds ratio) of at least 1.08 is significant. In another particular embodiment, a risk of at least 1.13 is significant. In yet another embodiment, a risk of at least 1.19 is significant. Other cutoffs are also contemplated, e.g., at least 1.15, 1.25, 1.35, and so on, and such cutoffs are also within scope of the present invention. In other embodiments, a significant increase in risk is at least 15%, 16%, 17%, 18%, 19%, 20%, 25%, 30%, 35%, 40%, 45%, 50%, 55%, 60%, 65%, 70%, 75%, 80%, 85%, 90%, 95%, and at least 100%. In one particular embodiment, a significant increase in risk is at least 8%. In another particular embodiment, a significant increase in risk is at least 13%. In another particular embodiment, a significant increase in risk is at least 19%. Other cutoffs or ranges as deemed suitable by the person skilled in the art to characterize the invention are however also contemplated, and those are also within scope of the present invention. In certain embodiments, a significant increase in risk is characterized by a p-value, such as a p-value of less than 0.05, less than 0.01, less than 0.001, less than 0.0001, less than 0.00001, less than 0.000001, less than 0.0000001, less than 0.00000001, or less than 0.000000001.

[0117] An at-risk polymorphic marker or haplotype as described herein is one where at least one allele of at least one marker or haplotype is more frequently present in an individual at risk for prostate cancer (affected), or diagnosed with prostate cancer, compared to the frequency of its presence in a comparison group (control), such that the presence of the marker or haplotype is indicative of susceptibility to prostate cancer. The control group may in one embodiment be a population sample, i.e. a random sample from the general population. In another embodiment, the control group is represented by a group of individuals who are disease-free. Such disease-free controls may in one embodiment be characterized by the absence of one or more specific disease-associated symptoms. Alternatively, the disease-free controls are those that have not been diagnosed with prostate cancer. In another embodiment, the disease-free control group is characterized by the absence of one or more disease-specific risk factors. Such risk factors are in one embodiment at least one environmental risk factor. Representative environmental factors are risk factors related to lifestyle, including but not limited to food and drink habits, geographical location of main habitat, and occupational risk factors. In another embodiment, the risk factors comprise at least one additional genetic risk factor for prostate cancer.

[0118] As an example of a simple test for correlation would be a Fisher-exact test on a two by two table. Given a cohort of chromosomes, the two by two table is constructed out of the number of chromosomes that include both of the markers or haplotypes, one of the markers or haplotypes but not the other and neither of the markers or haplotypes. Other statistical tests of association known to the skilled person are also contemplated and are also within scope of the invention.

[0119] In other embodiments of the invention, an individual who is at a decreased susceptibility (i.e., at a decreased risk) for a disease (e.g., prostate cancer) is an individual in whom at least one specific allele at one or more polymorphic marker or haplotype conferring decreased susceptibility for the disease or trait is identified. The marker alleles and/or haplotypes conferring decreased risk are also said to be protective. In one aspect, the protective marker or haplotype is one that confers a significant decreased risk (or susceptibility) of the disease or trait. In one embodiment, significant decreased risk is measured as a relative risk (or odds ratio) of less than 0.95, including but not limited to less than 0.9, less than 0.8, less than 0.7, less than 0.6, less than 0.5, less than 0.4, less than 0.3, less than 0.2 and less than 0.1. In one particular embodiment, significant decreased risk is less than 0.90. In another embodiment, significant decreased risk is less than 0.85. In yet another embodiment, significant decreased risk is less than 0.80. In another embodiment, the decrease in risk (or susceptibility) is at least 8%, including but not limited to at least 13%, at least 19%, at least 20%, at least 25%, at least 30%, at least 35%, at least 40%, at least 45%, and at least 50%. In one particular embodiment, a significant decrease in risk is at least about 8%. In another embodiment, a significant decrease in risk is at least about 13%. In another embodiment, the decrease in risk is at least about 19%. Other cutoffs or ranges as deemed suitable by the person skilled in the art to characterize the invention are however also contemplated, and those are also within scope of the present invention.

[0120] The person skilled in the art will appreciate that for markers with two alleles present in the population being studied (such as SNPs), and wherein one allele is found in increased frequency in a group of individuals with prostate cancer, compared with controls, the other allele of the marker will be found in decreased frequency in the group of individuals with prostate cancer, compared with controls. In such a case, one allele of the marker (the one found in increased frequency in individuals with prostate cancer) will be the at-risk allele, while the other allele will be a protective allele.

[0121] A genetic variant associated with a disease or a trait can be used alone to predict the risk of the disease for a given genotype. For a biallelic marker, such as a SNP, there are 3 possible genotypes: homozygote for the at risk variant, heterozygote, and non carrier of the at risk variant. Risk associated with variants at multiple loci can be used to estimate overall risk. For multiple SNP variants, there are k possible genotypes k=3ⁿ×2p; where n is the number autosomal loci and p the number of gonosomal (sex chromosomal) loci. Overall risk assessment calculations for a plurality of risk variants usually assume that the relative risks of different genetic variants multiply, i.e. the overall risk (e.g., RR or OR) associated with a particular genotype combination is the product of the risk values for the genotype at each locus. If the risk presented is the relative risk for a person, or a specific genotype for a person, compared to a reference population with matched gender and ethnicity, then the combined risk—is the product of the locus specific risk values—and which also corresponds to an overall risk estimate compared with the population. If the risk for a person is based on a comparison to non-carriers of the at risk allele, then the combined risk corresponds to an estimate that compares the person with a given combination of genotypes at all loci to a group of individuals who do not carry risk variants at any of those loci. The group of non-carriers of any at risk variant has the lowest estimated risk and has a combined risk, compared with itself (i.e., non-carriers) of 1.0, but has an overall risk, compare with the population, of less than 1.0. It should be noted that the group of non-carriers can potentially be very small, especially for large number of loci, and in that case, its relevance is correspondingly small.

[0122] The multiplicative model is a parsimonious model that usually fits the data of complex traits reasonably well. Deviations from multiplicity have been rarely described in the context of common variants for common diseases, and if reported are usually only suggestive since very large sample sizes are usually required to be able to demonstrate statistical interactions between loci.

[0123] By way of an example, let us consider a total of eight variants that have been described to associate with prostate cancer (rs2710646, rs16901979, rs1447295, rs6983267, rs7947353, rs1859962, rs4430796 and rs5945572; Gudmundsson, J. et al. Nat Genet 40:281-3 (2008); Gudmundsson, J., et al., Nat Genet 39:631-7 (2007), Gudmundsson, J., et al., Nat Genet 39:977-83 (2007); Yeager, M., et al, Nat Genet 39:645-49 (2007), Amundadottir, L., et al., Nat Genet 38:652-8 (2006); Thomas, G. et al. Nat Genet 40:310-15 (2008); Eeles, R. A., et al. Nat Genet 40:316-21 (2008)). Seven of these loci are on autosomes, and the remaining locus is on chromosome X. The total number of theoretical genotypic combinations is then 3⁷×2¹=4374. Some of those genotypic classes are very rare, but are still possible, and should be considered for overall risk assessment. It is likely that the multiplicative model applied in the case of multiple genetic variant will also be valid in conjugation with non-genetic risk variants assuming that the genetic variant does not clearly correlate with the “environmental” factor. In other words, genetic and non-genetic at-risk variants can be assessed under the multiplicative model to estimate combined risk, assuming that the non-genetic and genetic risk factors do not interact.

[0124] Combining the additional risk factors for prostate cancer described herein, can be performed in an analogous fashion. Any one, or a combination of, the markers conferring increased risk of prostate cancer described herein, can be evaluated to perform overall risk assessment of prostate cancer. The variants can also be combined with any other genetic markers conferring risk of prostate cancer.

### Risk Assessment and Diagnostics

[0125] Within any given population, there is an absolute risk of developing a disease or trait, defined as the chance of a person developing the specific disease or trait over a specified time-period. For example, a woman's lifetime absolute risk of breast cancer is one in nine. That is to say, one woman in every nine will develop breast cancer at some point in their lives. Risk is typically measured by looking at very large numbers of people, rather than at a particular individual. Risk is often presented in terms of Absolute Risk (AR) and Relative Risk (RR). Relative Risk is used to compare risks associating with two variants or the risks of two different groups of people. For example, it can be used to compare a group of people with a certain genotype with another group having a different genotype. For a disease, a relative risk of 2 means that one group has twice the chance of developing a disease as the other group. The risk presented is usually the relative risk for a person, or a specific genotype of a person, compared to the population with matched gender and ethnicity. Risks of two individuals of the same gender and ethnicity could be compared in a simple manner. For example, if, compared to the population, the first individual has relative risk 1.5 and the second has relative risk 0.5, then the risk of the first individual compared to the second individual is 1.5/0.5=3.

[0126] The creation of a model to calculate the overall genetic risk involves two steps: i) conversion of odds-ratios for a single genetic variant into relative risk and ii) combination of risk from multiple variants in different genetic loci into a single relative risk value.

[0127] Deriving risk from odds-ratios. Most gene discovery studies for complex diseases that have been published to date in authoritative journals have employed a case-control design because of their retrospective setup. These studies sample and genotype a selected set of cases (people who have the specified disease condition) and control individuals. The interest is in genetic variants (alleles) which frequency in cases and controls differ significantly.

[0128] The results are typically reported in odds-ratios, that is the ratio between the fraction (probability) with the risk variant (carriers) versus the non-risk variant (non-carriers) in the groups of affected versus the controls, i.e. expressed in terms of probabilities conditional on the affection status:

OR=(Pr(c|A)/Pr(nc|A))/(Pr(c|C)/Pr(nc|C))

[0129] Sometimes it is however the absolute risk for the disease that we are interested in, i.e. the fraction of those individuals carrying the risk variant who get the disease or in other words the probability of getting the disease. This number cannot be directly measured in case-control studies, in part, because the ratio of cases versus controls is typically not the same as that in the general population. However, under certain assumption, we can estimate the risk from the odds-ratio.

[0130] It is well known that under the rare disease assumption, the relative risk of a disease can be approximated by the odds-ratio. This assumption may however not hold for many common diseases. Still, it turns out that the risk of one genotype variant relative to another can be estimated from the odds-ratio expressed above. The calculation is particularly simple under the assumption of random population controls where the controls are random samples from the same population as the cases, including affected people rather than being strictly unaffected individuals. To increase sample size and power, many of the large genome-wide association and replication studies used controls that were neither age-matched with the cases, nor were they carefully scrutinized to ensure that they did not have the disease at the time of the study. Hence, while not exactly, they often approximate a random sample from the general population. It is noted that this assumption is rarely expected to be satisfied exactly, but the risk estimates are usually robust to moderate deviations from this assumption.

[0131] Calculations show that for the dominant and the recessive models, where we have a risk variant carrier, “c”, and a non-carrier, “nc”, the odds-ratio of individuals is the same as the risk-ratio between these variants:

OR=Pr(A|c)/Pr(A|nc)=r

[0132] And likewise for the multiplicative model, where the risk is the product of the risk associated with the two allele copies, the allelic odds-ratio equals the risk factor:

OR=Pr(A|aa)/Pr(A|ab)=Pr(A|ab)/Pr(A|bb)=r

[0133] Here “a” denotes the risk allele and “b” the non-risk allele. The factor “r” is therefore the relative risk between the allele types.

[0134] For many of the studies published in the last few years, reporting common variants associated with complex diseases, the multiplicative model has been found to summarize the effect adequately and most often provide a fit to the data superior to alternative models such as the dominant and recessive models.

[0135] The risk relative to the average population risk. It is most convenient to represent the risk of a genetic variant relative to the average population since it makes it easier to communicate the lifetime risk for developing the disease compared with the baseline population risk. For example, in the multiplicative model we can calculate the relative population risk for variant “aa” as:

RR(aa)=Pr(A|aa)/Pr(A)=(Pr(A|aa)/Pr(A|bb))/(Pr(A)/Pr(A|bb))=r²/(Pr(aa)r²+Pr(ab)r+Pr(bb))=r²/(p²r²+2pqr+q²)=r²/R

[0136] Here “p” and “q” are the allele frequencies of “a” and “b” respectively. Likewise, we get that RR(ab)=r/R and RR(bb)=1/R. The allele frequency estimates may be obtained from the publications that report the odds-ratios and from the HapMap database. Note that in the case where we do not know the genotypes of an individual, the relative genetic risk for that test or marker is simply equal to one.

[0137] As an example, for prostate cancer risk, allele C of the disease associated marker rs8102476 on chromosome 19 has an allelic OR of 1.13 and a frequency (p) around 0.51 in white populations (Table 1). The genotype relative risk compared to genotype TT (homozygous for the alternate allele of rs8102476) are estimated based on the multiplicative model.

[0138] For CC it is 1.13×1.13=1.28; for CT it is simply the OR 1.13, and for TT it is 1.0 by definition.

[0139] The frequency of allele T is q=1−p=1−0.51=0.49. Population frequency of each of the three possible genotypes at this marker is:

Pr(CC)=p²=0.26, Pr(CT)=2pq=0.50, and Pr(TT)=q²=0.24

[0140] The average population risk relative to genotype TT (which is defined to have a risk of one) is:

R=0.26×1.28+0.50×1.13+0.24×1=1.14

[0141] Therefore, the risk relative to the general population (RR) for individuals who have one of the following genotypes at this marker is:

RR(CC)=1.28/1.14=1.12, RR(CT)=1.13/1.14=0.99, RR(TT)=1/1.14=0.88.

[0142] Risk for other markers described herein (e.g., rs10934853, rs16902094 and rs445114) may be described in an analogous fashion. Determining risk compared with non-carriers of the risk allele C will of course give higher values of RR.

[0143] Combining the risk from multiple markers. When genotypes of many SNP variants are used to estimate the risk for an individual, unless otherwise stated, a multiplicative model for risk can be assumed. This means that the combined genetic risk relative to the population is calculated as the product of the corresponding estimates for individual markers, e.g. for two markers g1 and g2:

RR(g1,g2)=RR(g1)RR(g2)

[0144] The underlying assumption is that the risk factors occur and behave independently, i.e. that the joint conditional probabilities can be represented as products:

Pr(A|g1,g2)=Pr(A|g1)Pr(A|g2)/Pr(A) and Pr(g1,g2)=Pr(g1)Pr(g2)

[0145] Obvious violations to this assumption are markers that are closely spaced on the genome, i.e. in linkage disequilibrium such that the concurrence of two or more risk alleles is correlated. In such cases, we can use so called haplotype modeling where the odds-ratios are defined for all allele combinations of the correlated SNPs.

[0146] As is in most situations where a statistical model is utilized, the model applied is not expected to be exactly true since it is not based on an underlying bio-physical model. However, the multiplicative model has so far been found to fit the data adequately, i.e. no significant deviations are detected for many common diseases for which many risk variants have been discovered.

[0147] A number of genetic markers in different genomic locations have been found to be associated with prostate cancer, as shown in Table 7, in addition to the markers shown herein to be associated with risk of prostate cancer. It can be useful to estimate genetic risk of prostate cancer for combinations of such markers, optionally including any one, or a combination of, the markers described herein. Determining risk for multiple markers captures a greater percentage of the genetic risk of prostate cancer in the population. For example, by combining risk for 22 prostate cancer risk variants typed in the Icelandic population, carriers belonging to the top 1.3% of the risk distribution have a risk of developing the disease that is more than 2.5 times greater than the population average risk estimates (see Table 7). For these individuals this corresponds to a lifetime risk of over 25% of being diagnosed with prostate cancer, compared with a population average life time risk of about 10% in Iceland.

[0148] As an example of how combined risk may be estimated, an individual who has the following genotypes at 8 markers associated with risk of prostate cancer along with the risk relative to the population at each marker:

| | | | |
|---|---|---|---|
| rs2710646 | AA | Calculated risk: | RR(AA) = 1.25 |
| rs16901979 | CC | Calculated risk: | RR(CC) = 0.96 |
| rs1447295 | AC | Calculated risk: | RR(AC) = 1.39 |
| rs6983267 | GT | Calculated risk: | RR(GT) = 0.99 |
| rs7947353 | AA | Calculated risk: | RR(AA) = 1.19 |
| rs1859962 | GG | Calculated risk: | RR(GG) = 1.21 |
| rs4430796 | GG | Calculated risk: | RR(GG) = 0.82 |
| rs5945572 | AA | Calculated risk: | RR(AA) = 1.14 |

[0149] Combined, the overall risk relative to the population for this individual is: 1.25×0.96×1.39×0.99×1.19×1.21×0.82×1.14=2.22.

[0150] We can combine risk for the markers described herein (e.g., rs16902094, rs8102476, rs445114 and rs10934853, or surrogate markers in linkage disequilibrium with any one of these markers), or any combination of the markers described herein with other markers conferring risk of prostate cancer in an analogous fashion. Calculated combined risk can thus be obtained for any combination of such markers.

[0151] In certain embodiments, combined risk of prostate cancer is determined for any combination of two or more markers selected from the group consisting of rs2710646 on chromosome 2p15, rs2660753 on chromosome 3p12, rs401681 on chromosome 5p15, rs9364554 on chromosome 6q25, rs10486567 on chromosome 7p15, rs6465657 on chromosome 7q21, rs1447295 on chromosome 8q24, rs16901979 on chromosome 8q24, rs6983267 on chromosome 8q24, rs1571801 on chromosome 9q33, rs10993994 on chromosome 10q11, rs4962416 on chromosome 10q26, rs10896450 on chromosome 11q13, rs4430796 on chromosome 17q12, rs11649743 on chromosome 17q12, rs1859962 on chromosome 17q24.3, rs2735839 on chromosome 19q13.33, rs9623117 on chromosome 22q13, rs5945572 on chromosome Xp11, rs10934853 on chromosome 3q21, rs16902094 on chromosome 8q24, rs445114 on chromosome 8q24 and rs8102476 on chromosome 19q13. Alternatively, any surrogate markers for these markers can be used in such risk assessment. For example, rs721048 is a surrogate marker for rs2710646; rs10896449 and rs7931342 are surrogate markers for rs10896450, and rs5945619 is a surrogate marker for rs5945572.

[0152] In certain embodiments, combined risk is determined for 3 or more markers. In certain other embodiments, combined risk is determined for 4 or more markers. In certain other embodiments, combined risk is determined for 5 or more markers. In certain other embodiments, combined risk is determined for 6 or more markers. In certain other embodiments, combined risk is determined for 7 or more markers. In certain other embodiments, combined risk is determined for 8 or more markers. In certain other embodiments, combined risk is determined for 9 or more markers. In certain other embodiments, combined risk is determined for 10 or more markers, including 11 or more, 12 or more, 13 or more, 14 or more, 15 or more, 16 or more, 17 or more, 18 or more, 19 or more, 20 or more, 21 one or more, 22 two or more, 23 or more markers, 24 or more markers, 25 or more markers, 26 or more markers, 27 or more markers, or 28 or more markers.

[0153] In certain embodiments, combined risk is determined for no more than fifty markers. In certain embodiments, combined risk is determined for no more than thirty markers, no more than 25 markers, no more than 23 markers, no more than 22 markers, no more than 21 markers, no more than 20 markers, no more than 15 markers, or no more than 10 markers.

[0154] In certain embodiments, any one, or a combination of, the markers rs16902094, rs10934853, rs445114 and rs8102476, may be assessed in combination with any one marker, or a combination of markers, selected from the group consisting of rs2710646, rs2660753, rs401681, rs9364554, rs10486567, rs6465657, rs1447295, rs16901979, rs6983267, rs1571801, rs10993994, rs4962416, rs10896450, rs4430796, rs11649743, rs1859962, rs2735839, rs9623117, rs5945572, rs7127900, rs10896449, rs8102476, rs5759167, rs10207654, rs7679673, rs1512268, rs10505483, and rs10086908. For these markers, rs2710646 allele A, rs2660753 allele T, rs401681 allele C, rs9364554 allele T, rs10486567 allele G, rs6465657 allele C, rs1447295 allele A, rs16901979 allele A, rs6983267 allele G, rs1571801 allele A, rs10993994 allele T, rs4962416 allele C, rs10896450 allele G, rs4430796 allele A, rs11649743 allele G, rs1859962 allele G, rs2735839 allele G, rs9623117 allele C, rs5945572 allele A rs7127900 allele A, rs10896449 allele G, rs8102476 allele C, rs5759167 allele G, rs10207654 allele A, rs7679673 allele C, rs1512268 allele A, rs10505483 allele A, and rs10086908 allele T are indicative of increased susceptibility of prostate cancer, and the alternate allele is thus indicative of decreased susceptibility of prostate cancer.

[0155] In one preferred embodiment, combined risk is determined for any combination of two or more markers selected from the group consisting of rs2710646, rs16901979, rs1447295, rs6983267, rs7947353, rs1859962, rs4430796, rs5945572, rs16902094, rs16902104, rs8102476, rs445114, rs620861 and rs10934853. In another preferred embodiment, combined risk is determined for the group of markers consisting of rs2710646, rs16901979, rs1447295, rs6983267, rs7947353, rs1859962, rs4430796, rs5945572, rs16902094, rs8102476, rs445114 and rs10934853. In another preferred embodiment, combined risk is determined for the group of markers consisting of rs2710646, rs16901979, rs1447295, rs6983267, rs7947353, rs1859962, rs4430796, rs5945572 and rs16902094.

### Adjusted Life-Time Risk

[0156] The lifetime risk of an individual is derived by multiplying the overall genetic risk relative to the population with the average life-time risk of the disease in the general population of the same ethnicity and gender and in the region of the individual's geographical origin. As there are usually several epidemiologic studies to choose from when defining the general population risk, we will pick studies that are well-powered for the disease definition that has been used for the genetic variants.

[0157] For example, if the overall genetic risk relative to the population for a disease is 1.8 for a white male, and if the average life-time risk of the disease for individuals of his demographic is 20%, then the adjusted lifetime risk for him is 20%×1.8=36%.

[0158] Note that since the average RR for a population is one, this multiplication model provides the same average adjusted life-time risk of the disease. Furthermore, since the actual life-time risk cannot exceed 100%, there must be an upper limit to the genetic RR.

### Risk Assessment for Prostate Cancer

[0159] As described herein, certain polymorphic markers and haplotypes comprising such markers are found to be useful for risk assessment of prostate cancer. Risk assessment can involve the use of the markers for determining a susceptibility to prostate cancer. Particular alleles of polymorphic markers (e.g., SNPs) are found more frequently in individuals with prostate cancer, than in individuals without diagnosis of prostate cancer. Therefore, these marker alleles have predictive value for detecting prostate cancer, or a susceptibility to prostate cancer, in an individual. Tagging markers in linkage disequilibrium with at-risk variants (or protective variants) described herein can be used as surrogates for these markers (and/or haplotypes). Such surrogate markers can be located within a particular haplotype block or LD block. Such surrogate markers can also sometimes be located outside the physical boundaries of such a haplotype block or LD block, either in close vicinity of the LD block/haplotype block, but possibly also located in a more distant genomic location.

[0160] Long-distance LD can for example arise if particular genomic regions (e.g., genes) are in a functional relationship. For example, if two genes encode proteins that play a role in a shared metabolic pathway, then particular variants in one gene may have a direct impact on observed variants for the other gene. Let us consider the case where a variant in one gene leads to increased expression of the gene product. To counteract this effect and preserve overall flux of the particular pathway, this variant may have led to selection of one (or more) variants at a second gene that confers decreased expression levels of that gene. These two genes may be located in different genomic locations, possibly on different chromosomes, but variants within the genes are in apparent LD, not because of their shared physical location within a region of high LD, but rather due to evolutionary forces. Such LD is also contemplated and within scope of the present invention. The skilled person will appreciate that many other scenarios of functional gene-gene interaction are possible, and the particular example discussed here represents only one such possible scenario.

[0161] Markers with values of r² equal to 1 are perfect surrogates for the at-risk variants, i.e. genotypes for one marker perfectly predicts genotypes for the other. Markers with smaller values of r² than 1 can also be surrogates for the at-risk variant, or alternatively represent variants with relative risk values as high as or possibly even higher than the at-risk variant. The at-risk variant identified may not be the functional variant itself, but is in this instance in linkage disequilibrium with the true functional variant. The functional variant may for example be a tandem repeat, such as a minisatellite or a microsatellite, a transposable element (e.g., an Alu element), or a structural alteration, such as a deletion, insertion or inversion (sometimes also called copy number variations, or CNVs). The present invention encompasses the assessment of such surrogate markers for the markers as disclosed herein. Such markers are annotated, mapped and listed in public databases, as well known to the skilled person, or can alternatively be readily identified by sequencing the region or a part of the region identified by the markers of the present invention in a group of individuals, and identify polymorphisms in the resulting group of sequences. As a consequence, the person skilled in the art can readily and without undue experimentation identify and genotype surrogate markers in linkage disequilibrium with the markers and/or haplotypes as described herein. The tagging or surrogate markers in LD with the at-risk variants detected, also have predictive value for detecting association to the disease, or a susceptibility to the disease, in an individual. These tagging or surrogate markers that are in LD with the markers of the present invention can also include other markers that distinguish among haplotypes, as these similarly have predictive value for detecting susceptibility to the particular disease.

[0162] The present invention can in certain embodiments be practiced by assessing a sample comprising genomic DNA from an individual for the presence of variants described herein to be associated with prostate cancer. Such assessment typically steps that detect the presence or absence of at least one allele of at least one polymorphic marker, using methods well known to the skilled person and further described herein, and based on the outcome of such assessment, determine whether the individual from whom the sample is derived is at increased or decreased risk (increased or decreased susceptibility) of prostate cancer. Detecting particular alleles of polymorphic markers can in certain embodiments be done by obtaining nucleic acid sequence data about a particular human individual, which identifies at least one allele of at least one polymorphic marker. Different alleles of the at least one marker are associated with different susceptibility to the disease in humans. Obtaining nucleic acid sequence data can comprise nucleic acid sequence at a single nucleotide position, which is sufficient to identify alleles at SNPs. The nucleic acid sequence data can also comprise sequence at any other number of nucleotide positions, in particular for genetic markers that comprise multiple nucleotide positions, and can be anywhere from two to hundreds of thousands, possibly even millions, of nucleotides (in particular, in the case of copy number variations (CNVs)).

[0163] In certain embodiments, the invention can be practiced utilizing a dataset comprising information about the genotype status of at least one polymorphic marker associated with a disease (or markers in linkage disequilibrium with at least one marker associated with the disease). In other words, a dataset containing information about such genetic status, for example in the form of genotype counts at a certain polymorphic marker, or a plurality of markers (e.g., an indication of the presence or absence of certain at-risk alleles), or actual genotypes for one or more markers, can be queried for the presence or absence of certain at-risk alleles at certain polymorphic markers shown by the present inventors to be associated with the disease. A positive result for a variant (e.g., marker allele) associated with the disease, is indicative of the individual from which the dataset is derived is at increased susceptibility (increased risk) of the disease.

[0164] In certain embodiments of the invention, a polymorphic marker is correlated to a disease by referencing genotype data for the polymorphic marker to a look-up table that comprises correlations between at least one allele of the polymorphism and the disease. In some embodiments, the table comprises a correlation for one polymorphism. In other embodiments, the table comprises a correlation for a plurality of polymorphisms. In both scenarios, by referencing to a look-up table that gives an indication of a correlation between a marker and the disease, a risk for the disease, or a susceptibility to the disease, can be identified in the individual from whom the sample is derived. In some embodiments, the correlation is reported as a statistical measure. The statistical measure may be reported as a risk measure, such as a relative risk (RR), an absolute risk (AR) or an odds ratio (OR).

[0165] The markers described herein may be useful for risk assessment and diagnostic purposes, either alone or in combination. Results of prostate cancer risk based on the markers described herein can also be combined with data for other genetic markers or risk factors for prostate cancer, to establish overall risk, as illustrated and described in the above. Thus, even in cases where the increase in risk by individual markers is relatively modest, e.g. on the order of 10-30%, the association may have significant implications. Thus, relatively common variants may have significant contribution to the overall risk (Population Attributable Risk is high), or combination of markers can be used to define groups of individual who, based on the combined risk of the markers, is at significant combined risk of developing the disease.

[0166] Thus, in certain embodiments of the invention, a plurality of variants (genetic markers, biomarkers and/or haplotypes) is used for overall risk assessment. These variants are in one embodiment selected from the variants as disclosed herein. Other embodiments include the use of the variants of the present invention in combination with other variants known to be useful for diagnosing a susceptibility to prostate cancer. In such embodiments, the genotype status of a plurality of markers and/or haplotypes is determined in an individual, and the status of the individual compared with the population frequency of the associated variants, or the frequency of the variants in clinically healthy subjects, such as age-matched and sex-matched subjects. Methods known in the art, such as multivariate analyses or joint risk analyses or other methods known to the skilled person, may subsequently be used to determine the overall risk conferred based on the genotype status at the multiple loci. Assessment of risk based on such analysis may subsequently be used in the methods, uses and kits of the invention, as described herein.

[0167] As described in the above, the haplotype block structure of the human genome has the effect that a large number of variants (markers and/or haplotypes) in linkage disequilibrium with the variant originally associated with a disease or trait may be used as surrogate markers for assessing association to the disease or trait. The number of such surrogate markers will depend on factors such as the historical recombination rate in the region, the mutational frequency in the region (i.e., the number of polymorphic sites or markers in the region), and the extent of LD (size of the LD block) in the region. These markers are usually located within the physical boundaries of the LD block or haplotype block in question as defined using the methods described herein, or by other methods known to the person skilled in the art. However, sometimes marker and haplotype association is found to extend beyond the physical boundaries of the haplotype block as defined, as discussed in the above. Such markers and/or haplotypes may in those cases be also used as surrogate markers and/or haplotypes for the markers and/or haplotypes physically residing within the haplotype block as defined. As a consequence, markers and haplotypes in LD (typically characterized by inter-marker r² values of greater than 0.1, such as r² greater than 0.2, including r² greater than 0.3, also including markers correlated by values for r² greater than 0.4) with the markers and haplotypes of the present invention are also within the scope of the invention, even if they are physically located beyond the boundaries of the haplotype block as defined. This includes markers that are described herein but may also include other markers that are in LD with one or more of the these markers.

[0168] For the SNP markers described herein, the opposite allele to the allele found to be in excess in patients (at-risk allele) is found in decreased frequency in prostate cancer. These markers and haplotypes in LD and/or comprising such markers, are thus protective for prostate cancer, i.e. they confer a decreased risk or susceptibility of individuals carrying these markers and/or haplotypes developing prostate cancer.

[0169] Certain variants of the present invention, including certain haplotypes comprise, in some cases, a combination of various genetic markers, e.g., SNPs and microsatellites. Detecting haplotypes can be accomplished by methods known in the art and/or described herein for detecting sequences at polymorphic sites. Furthermore, correlation between certain haplotypes or sets of markers and disease phenotype can be verified using standard techniques. A representative example of a simple test for correlation would be a Fisher-exact test on a two by two table.

[0170] In specific embodiments, a marker allele or haplotype found to be associated with prostate cancer, is one in which the marker allele or haplotype is more frequently present in an individual at risk for prostate cancer (affected), compared to the frequency of its presence in a healthy individual (control), or in randombly selected individual from the population, wherein the presence of the marker allele or haplotype is indicative of a susceptibility to prostate cancer. In other embodiments, at-risk markers in linkage disequilibrium with one or more markers shown herein to be associated with prostate cancer are tagging markers that are more frequently present in an individual at risk for prostate cancer (affected), compared to the frequency of their presence in a healthy individual (control) or in a randomly selected individual from the population, wherein the presence of the tagging markers is indicative of increased susceptibility to prostate cancer. In a further embodiment, at-risk markers alleles (i.e. conferring increased susceptibility) in linkage disequilibrium with one or more markers found to be associated with prostate cancer, are markers comprising one or more allele that is more frequently present in an individual at risk for prostate cancer, compared to the frequency of their presence in a healthy individual (control), wherein the presence of the markers is indicative of increased susceptibility to prostate cancer.

### Study Population

[0171] In a general sense, the methods and kits of the invention can be utilized from samples containing nucleic acid material (DNA or RNA) from any source and from any individual, or from genotype data derived from such samples. In preferred embodiments, the individual is a human individual. The individual can be an adult, child, or fetus. The nucleic acid source may be any sample comprising nucleic acid material, including biological samples, or a sample comprising nucleic acid material derived therefrom. The present invention also provides for assessing markers and/or haplotypes in individuals who are members of a target population. Such a target population is in one embodiment a population or group of individuals at risk of developing the disease, based on other genetic factors, biomarkers (e.g., PSA), biophysical parameters, or general health and/or lifestyle parameters (e.g., history of prostate cancer or related cancer, previous diagnosis of prostate cancer, family history of prostate cancer).

[0172] The invention provides for embodiments that include individuals from specific age subgroups, such as those over the age of 40, over age of 45, or over age of 50, 55, 60, 65, 70, 75, 80, or 85. Other embodiments of the invention pertain to other age groups, such as individuals aged less than 85, such as less than age 80, less than age 75, or less than age 70, 65, 60, 55, 50, 45, 40, 35, or age 30. Other embodiments relate to individuals with age at onset of prostate cancer in any of the age ranges described in the above. It is also contemplated that a range of ages may be relevant in certain embodiments, such as age at onset at more than age 45 but less than age 60. Other age ranges are however also contemplated, including all age ranges bracketed by the age values listed in the above. The invention furthermore relates to individuals of either gender, males or females.

[0173] The Icelandic population is a Caucasian population of Northern European ancestry. A large number of studies reporting results of genetic linkage and association in the Icelandic population have been published in the last few years. Many of those studies show replication of variants, originally identified in the Icelandic population as being associating with a particular disease, in other populations (Styrkarsdottir, U., et al. N Engl J Med Apr. 29, 2008 (Epub ahead of print); Thorgeirsson, T., et al. Nature 452:638-42 (2008); Gudmundsson, J., et al. Nat Genet. 40:281-3 (2008); Stacey, S, N., et al., Nat Genet. 39:865-69 (2007); Helgadottir, A., et al., Science 316:1491-93 (2007); Steinthorsdottir, V., et al., Nat Genet. 39:770-75 (2007); Gudmundsson, et al., Nat Genet. 39:631-37 (2007); Frayling, T M, Nature Reviews Genet 8:657-662 (2007); Amundadottir, L. T., et al., Nat Genet. 38:652-58 (2006); Grant, S. F., et al., Nat Genet. 38:320-23 (2006)). Thus, genetic findings in the Icelandic population have in general been replicated in other populations, including populations from Africa and Asia.

[0174] It is thus believed that the markers of the present invention found to be associated with prostate cancer will show similar association in other human populations. Particular embodiments comprising individual human populations are thus also contemplated and within the scope of the invention. Such embodiments relate to human subjects that are from one or more human population including, but not limited to, Caucasian populations, European populations, American populations, Eurasian populations, Asian populations, Central/South Asian populations, East Asian populations, Middle Eastern populations, African populations, Hispanic populations, and Oceanian populations. European populations include, but are not limited to, Swedish, Norwegian, Finnish, Russian, Danish, Icelandic, Irish, Kelt, English, Scottish, Dutch, Belgian, French, German, Spanish, Portuguese, Italian, Polish, Bulgarian, Slavic, Serbian, Bosnian, Czech, Greek and Turkish populations.

[0175] In certain embodiments, the invention relates to populations that include black African ancestry such as populations comprising persons of African descent or lineage. Black African ancestry may be determined by self reporting as African-Americans, Afro-Americans, Black Americans, being a member of the black race or being a member of the negro race. For example, African Americans or Black Americans are those persons living in North America and having origins in any of the black racial groups of Africa. In another example, self-reported persons of black African ancestry may have at least one parent of black African ancestry or at least one grandparent of black African ancestry.

[0176] The racial contribution in individual subjects may also be determined by genetic analysis.

[0177] Genetic analysis of ancestry may be carried out using unlinked microsatellite markers such as those set out in Smith et al. (Am J Hum Genet 74, 1001-13 (2004)).

[0178] In certain embodiments, the invention relates to markers and/or haplotypes identified in specific populations, as described in the above. The person skilled in the art will appreciate that measures of linkage disequilibrium (LD) may give different results when applied to different populations. This is due to different population history of different human populations as well as differential selective pressures that may have led to differences in LD in specific genomic regions. It is also well known to the person skilled in the art that certain markers, e.g. SNP markers, have different population frequency in different populations, or are polymorphic in one population but not in another. The person skilled in the art will however apply the methods available and as thought herein to practice the present invention in any given human population. This may include assessment of polymorphic markers in the LD region of the present invention, so as to identify those markers that give strongest association within the specific population. Thus, the at-risk variants of the present invention may reside on different haplotype background and in different frequencies in various human populations. However, utilizing methods known in the art and the markers of the present invention, the invention can be practiced in any given human population.

### Utility of Genetic Testing

[0179] The person skilled in the art will appreciate and understand that the variants described herein in general do not, by themselves, provide an absolute identification of individuals who will develop a particular disease. The variants described herein do however indicate increased and/or decreased likelihood that individuals carrying the at-risk or protective variants of the invention will develop symptoms associated with prostate cancer. This information is however extremely valuable in itself, as outlined in more detail in the below, as it can be used to, for example, initiate preventive measures at an early stage, perform regular physical and/or mental exams to monitor the progress and/or appearance of symptoms, or to schedule exams at a regular interval to identify the condition in question, so as to be able to apply treatment at an early stage.

[0180] The knowledge of a genetic variant that confers a risk of developing prostate cancer offers the opportunity to apply a genetic-test to distinguish between individuals with increased risk of developing the cancer (i.e. carriers of the at-risk variant) and those with decreased risk of developing the cancer (i.e. carriers of the protective variant, or non-carriers of the at-risk variant). The core values of genetic testing, for individuals belonging to both of the above mentioned groups, are the possibilities of being able to diagnose the cancer at an early stage and provide information to the clinician about prognosis/aggressiveness of the disease in order to be able to apply the most appropriate treatment. For example, the application of a genetic test for prostate cancer (including aggressive or high Gleason grade prostate cancer, less aggressive or low Gleason grade prostate cancer)) can provide an opportunity for the detection of the cancer at an earlier stage which may lead to the application of therapeutic measures at an earlier stage, and thus can minimize the deleterious effects of the symptoms and serious health consequences conferred by cancer. Some advantages of genetic tests for prostate cancer include:

### 1. To Aid Early Detection

[0181] The application of a genetic test for prostate cancer can provide an opportunity for the detection of the disease at an earlier stage which leads to higher cure rates, if found locally, and increases survival rates by minimizing regional and distant spread of the tumor. For prostate cancer, a genetic test will most likely increase the sensitivity and specificity of the already generally applied Prostate Specific Antigen (PSA) test and Digital Rectal Examination (DRE). This can lead to lower rates of false positives (thus minimize unnecessary procedures such as needle biopsies) and false negatives (thus increasing detection of occult disease and minimizing morbidity and mortality due to PCA).

### 2. To Determine Aggressiveness

[0182] Genetic testing can provide information about pre-diagnostic prognostic indicators and enable the identification of individuals at high or low risk for aggressive tumor types that can lead to modification in screening strategies. For example, an individual determined to be a carrier of a high risk allele for the development of aggressive prostate cancer will likely undergo more frequent PSA testing, examination and have a lower threshold for needle biopsy in the presence of an abnormal PSA value.

[0183] Furthermore, identifying individuals that are carriers of high or low risk alleles for aggressive tumor types will lead to modification in treatment strategies. For example, if prostate cancer is diagnosed in an individual that is a carrier of an allele that confers increased risk of developing an aggressive form of prostate cancer, then the clinician would likely advise a more aggressive treatment strategy such as a prostatectomy instead of a less aggressive treatment strategy.

[0184] As is known in the art, Prostate Specific Antigen (PSA) is a protein that is secreted by the epithelial cells of the prostate gland, including cancer cells. An elevated level in the blood indicates an abnormal condition of the prostate, either benign or malignant. PSA is used to detect potential problems in the prostate gland and to follow the progress of prostate cancer therapy. PSA levels above 4 ng/ml are indicative of the presence of prostate cancer (although as known in the art and described herein, the test is neither very specific nor sensitive).

[0185] In one embodiment, the method of the invention is performed in combination with (either prior to, concurrently or after) a PSA assay. In a particular embodiment, the presence of an at-risk marker or haplotype, in conjunction with the subject having a PSA level greater than 4 ng/ml, is indicative of a more aggressive prostate cancer and/or a worse prognosis. As described herein, particular markers and haplotypes are associated with high Gleason (i.e., more aggressive) prostate cancer. In another embodiment, the presence of a marker or haplotype, in a patient who has a normal PSA level (e.g., less than 4 ng/ml), is indicative of a high Gleason (i.e., more aggressive) prostate cancer and/or a worse prognosis. A “worse prognosis” or “bad prognosis” occurs when it is more likely that the cancer will grow beyond the boundaries of the prostate gland, metastasize, escape therapy and/or kill the host.

[0186] In one embodiment, the presence of a marker or haplotype is indicative of a predisposition to a somatic rearrangement (e.g., one or more of an amplification, a translocation, an insertion and/or deletion) in a tumor or its precursor. The somatic rearrangement itself may subsequently lead to a more aggressive form of prostate cancer (e.g., a higher histologic grade, as reflected by a higher Gleason score or higher stage at diagnosis, an increased progression of prostate cancer (e.g., to a higher stage), a worse outcome (e.g., in terms of morbidity, complications or death)). As is known in the art, the Gleason grade is a widely used method for classifying prostate cancer tissue for the degree of loss of the normal glandular architecture (size, shape and differentiation of glands). A grade from 1-5 is assigned successively to each of the two most predominant tissue patterns present in the examined tissue sample and are added together to produce the total or combined Gleason grade (scale of 2-10). High numbers indicate poor differentiation and therefore more aggressive cancer.

[0187] Aggressive prostate cancer is cancer that grows beyond the prostate, metastasizes and eventually kills the patient. As described herein, one surrogate measure of aggressiveness is a high combined Gleason grade. The higher the grade on a scale of 2-10 the more likely it is that a patient has aggressive disease.

[0188] The present invention furthermore relates to risk assessment for prostate cancer and colorectal cancer, including diagnosing whether an individual is at risk for developing prostate cancer and/or colorectal cancer. The polymorphic markers of the present invention can be used alone or in combination, as well as in combination with other factors, including other genetic risk factors or biomarkers, for risk assessment of an individual for prostate cancer and/or colorectal cancer. Certain factors known to affect the predisposition of an individual towards developing risk of developing common disease, including prostate cancer and/or colorectal cancer are known to the person skilled in the art and can be utilized in such assessment. These include, but are not limited to, age, gender, smoking status, family history of cancer, previously diagnosed cancer, colonic adenomas, chronic inflammatory bowel disease and diet. Methods known in the art can be used for such assessment, including multivariate analyses or logistic regression.

### Methods

[0189] Methods for disease risk assessment and risk management are described herein and are encompassed by the invention. The invention also encompasses methods of assessing an individual for probability of response to a therapeutic agents, methods for predicting the effectiveness of a therapeutic agents, nucleic acids, polypeptides and antibodies and computer-implemented functions. Kits for use in the various methods presented herein are also encompassed by the invention.

### Diagnostic and Screening Methods

[0190] In certain embodiments, the present invention pertains to methods of diagnosing, or aiding in the diagnosis of, prostate cancer or a susceptibility to prostate cancer, by detecting particular alleles at genetic markers that appear more frequently in prostate cancer subjects or subjects who are susceptible to prostate cancer. In certain other embodiments, the invention is a method of determining a susceptibility to prostate cancer by detecting and/or assessing at least one allele of at least one polymorphic marker (e.g., the markers described herein). In other embodiments, the invention relates to a method of determining a susceptibility to prostate cancer by detecting at least one allele of at least one polymorphic marker. The present invention describes methods whereby detection of particular alleles of particular markers or haplotypes is indicative of a susceptibility to prostate cancer. Such prognostic or predictive assays can also be used to determine prophylactic treatment of a subject prior to the onset of symptoms of prostate cancer.

[0191] The present invention pertains in some embodiments to methods of clinical applications of diagnosis, e.g., diagnosis performed by a medical professional. In other embodiments, the invention pertains to methods of diagnosis or methods of determination of a susceptibility performed by a layman. The layman can be the customer of a genotyping service. The layman may also be a genotype service provider, who performs genotype analysis on a DNA sample from an individual, in order to provide service related to genetic risk factors for particular traits or diseases, based on the genotype status of the individual (i.e., the customer). Recent technological advances in genotyping technologies, including high-throughput genotyping of SNP markers, such as Molecular Inversion Probe array technology (e.g., Affymetrix GeneChip), and BeadArray Technologies (e.g., Illumina GoldenGate and Infinium assays) have made it possible for individuals to have their own genome assessed for up to one million SNPs simultaneously, at relatively little cost. The resulting genotype information, which can be made available to the individual, can be compared to information about disease or trait risk associated with various SNPs, including information from public literature and scientific publications. The diagnostic application of disease-associated alleles as described herein, can thus for example be performed by the individual, through analysis of his/her genotype data, by a health professional based on results of a clinical test, or by a third party, including the genotype service provider. The third party may also be service provider who interprets genotype information from the customer to provide service related to specific genetic risk factors, including the genetic markers described herein. In other words, the diagnosis or determination of a susceptibility of genetic risk can be made by health professionals, genetic counselors, third parties providing genotyping service, third parties providing risk assessment service or by the layman (e.g., the individual), based on information about the genotype status of an individual and knowledge about the risk conferred by particular genetic risk factors (e.g., particular SNPs). In the present context, the term “diagnosing”, “diagnose a susceptibility” and “determine a susceptibility” is meant to refer to any available diagnostic method, including those mentioned above.

[0192] In certain embodiments, a sample containing genomic DNA from an individual is collected. Such sample can for example be a buccal swab, a saliva sample, a blood sample, or other suitable samples containing genomic DNA, as described further herein. The genomic DNA is then analyzed using any common technique available to the skilled person, such as high-throughput array technologies. Results from such genotyping are stored in a convenient data storage unit, such as a data carrier, including computer databases, data storage disks, or by other convenient data storage means. In certain embodiments, the computer database is an object database, a relational database or a post-relational database. The genotype data is subsequently analyzed for the presence of certain variants known to be susceptibility variants for a particular human condition, such as the genetic variants described herein. Genotype data can be retrieved from the data storage unit using any convenient data query method. Calculating risk conferred by a particular genotype for the individual can be based on comparing the genotype of the individual to previously determined risk (expressed as a relative risk (RR) or and odds ratio (OR), for example) for the genotype, for example for a heterozygous carrier of an at-risk variant for a particular disease or trait (such as prostate cancer). The calculated risk for the individual can be the relative risk for a person, or for a specific genotype of a person, compared to the average population with matched gender and ethnicity. The average population risk can be expressed as a weighted average of the risks of different genotypes, using results from a reference population, and the appropriate calculations to calculate the risk of a genotype group relative to the population can then be performed. Alternatively, the risk for an individual is based on a comparison of particular genotypes, for example heterozygous carriers of an at-risk allele of a marker compared with non-carriers of the at-risk allele. Using the population average may in certain embodiments be more convenient, since it provides a measure which is easy to interpret for the user, i.e. a measure that gives the risk for the individual, based on his/her genotype, compared with the average in the population. The calculated risk estimated can be made available to the customer via a website, preferably a secure website.

[0193] In certain embodiments, a service provider will include in the provided service all of the steps of isolating genomic DNA from a sample provided by the customer, performing genotyping of the isolated DNA, calculating genetic risk based on the genotype data, and report the risk to the customer. In some other embodiments, the service provider will include in the service the interpretation of genotype data for the individual, i.e., risk estimates for particular genetic variants based on the genotype data for the individual. In some other embodiments, the service provider may include service that includes genotyping service and interpretation of the genotype data, starting from a sample of isolated DNA from the individual (the customer).

[0194] Overall risk for multiple risk variants can be performed using standard methodology. For example, assuming a multiplicative model, i.e. assuming that the risk of individual risk variants multiply to establish the overall effect, allows for a straight-forward calculation of the overall risk for multiple markers.

[0195] In addition, in certain other embodiments, the present invention pertains to methods of determining a decreased susceptibility to prostate cancer, by detecting particular genetic marker alleles or haplotypes that appear less frequently in prostate cancer patients than in individual not diagnosed with prostate cancer or in the general population.

[0196] As described and exemplified herein, particular marker alleles or haplotypes are associated with prostate cancer. In one embodiment, the marker allele or haplotype is one that confers a significant risk or susceptibility to prostate cancer. In another embodiment, the invention relates to a method of determining a susceptibility to prostate cancer in a human individual, the method comprising determining the presence or absence of at least one allele of at least one polymorphic marker in a nucleic acid sample obtained from the individual. In another embodiment, the invention pertains to methods of determining a susceptibility to prostate cancer in a human individual, by screening for certain marker alleles or haplotypes. In certain embodiments, the marker allele or haplotype is more frequently present in a subject having, or who is susceptible to, prostate cancer (affected), as compared to the frequency of its presence in a healthy subject (control, such as population controls). In certain embodiments, the significance of association of the at least one marker allele or haplotype is characterized by a p value <0.05. In other embodiments, the significance of association is characterized by smaller p-values, such as <0.01, <0.001, <0.0001, <0.00001, <0.000001, <0.0000001, <0.00000001 or <0.000000001.

[0197] In these embodiments, the presence of the at least one marker allele or haplotype is indicative of a susceptibility to prostate cancer. These diagnostic methods involve determining whether particular alleles or haplotypes that are associated with risk of prostate cancer are present in particular individuals. The haplotypes described herein include combinations of alleles at various genetic markers (e.g., SNPs, microsatellites or other genetic variants). The detection of particular genetic marker alleles can be performed by a variety of methods described herein and/or known in the art. For example, genetic markers can be detected at the nucleic acid level (e.g., by direct nucleotide sequencing, or by other genotyping means known to the skilled in the art) or at the amino acid level if the genetic marker affects the coding sequence of a protein (e.g., by protein sequencing or by immunoassays using antibodies that recognize such a protein). The marker alleles or haplotypes of the present invention correspond to fragments of a genomic segments (e.g., genes) associated with prostate cancer. Such fragments encompass the DNA sequence of the polymorphic marker or haplotype in question, but may also include DNA segments in strong LD (linkage disequilibrium) with the marker or haplotype. In one embodiment, such segments comprises segments in LD with the marker or haplotype as determined by a value of r² greater than 0.1 and/or |D′|>0.8). In another embodiment, the segments are in LD with the marker or haplotype as determined by a value of r² of greater than 0.2.

[0198] In one embodiment, determination of a susceptibility to prostate cancer can be accomplished using hybridization methods. (see Current Protocols in Molecular Biology, Ausubel, F. et al., eds., John Wiley & Sons, including all supplements). The presence of a specific marker allele can be indicated by sequence-specific hybridization of a nucleic acid probe specific for the particular allele. The presence of more than one specific marker allele or a specific haplotype can be indicated by using several sequence-specific nucleic acid probes, each being specific for a particular allele. A sequence-specific probe can be directed to hybridize to genomic DNA, RNA, or cDNA. A “nucleic acid probe”, as used herein, can be a DNA probe or an RNA probe that hybridizes to a complementary sequence. One of skill in the art would know how to design such a probe so that sequence specific hybridization will occur only if a particular allele is present in a genomic sequence from a test sample. The invention can also be reduced to practice using any convenient genotyping method, including commercially available technologies and methods for genotyping particular polymorphic markers.

[0199] To determine a susceptibility to prostate cancer, a hybridization sample can be formed by contacting the test sample containing prostate cancer-associated nucleic acid, such as a genomic dna sample, with at least one nucleic acid probe. A non-limiting example of a probe for detecting mRNA or genomic DNA is a labeled nucleic acid probe that is capable of hybridizing to mRNA or genomic DNA sequences described herein. The nucleic acid probe can be, for example, a full-length nucleic acid molecule, or a portion thereof, such as an oligonucleotide of at least 15, 30, 50, 100, 250 or 500 nucleotides in length that is sufficient to specifically hybridize under stringent conditions to appropriate mRNA or genomic DNA. For example, the nucleic acid probe can comprise all or a portion of the nucleotide sequence of LD Block C19, LD Block C03, LD Block C08A and/or LD Block C08B, as described herein, optionally comprising at least one allele of a marker described herein, or at least one haplotype described herein, or the probe can be the complementary sequence of such a sequence. In a particular embodiment, the nucleic acid probe is a portion of the nucleotide sequence of LD Block C19, LD Block C03, LD Block C08A and/or LD Block C08B as described herein, optionally comprising at least one allele of a marker described herein, or at least one allele of one polymorphic marker or haplotype comprising at least one polymorphic marker described herein, or the probe can be the complementary sequence of such a sequence. The nucleic acid probe may also comprise all or a portion of the nucleotide sequence of a nucleotide with sequence as set forth in any one of SEQ ID NO:1-978 herein, or it can be the complement of such a sequence. The probe may optionally comprise at least one polymorphic marker as described herein. Other suitable probes for use in the diagnostic assays of the invention are described herein. Hybridization can be performed by methods well known to the person skilled in the art (see, e.g., Current Protocols in Molecular Biology, Ausubel, F. et al., eds., John Wiley & Sons, including all supplements). In one embodiment, hybridization refers to specific hybridization, i.e., hybridization with no mismatches (exact hybridization). In one embodiment, the hybridization conditions for specific hybridization are high stringency.

[0200] Specific hybridization, if present, is detected using standard methods. If specific hybridization occurs between the nucleic acid probe and the nucleic acid in the test sample, then the sample contains the allele that is complementary to the nucleotide that is present in the nucleic acid probe. The process can be repeated for any markers of the present invention, or markers that make up a haplotype of the present invention, or multiple probes can be used concurrently to detect more than one marker alleles at a time. It is also possible to design a single probe containing more than one marker alleles of a particular haplotype (e.g., a probe containing alleles complementary to 2, 3, 4, 5 or all of the markers that make up a particular haplotype). Detection of the particular markers of the haplotype in the sample is indicative that the source of the sample has the particular haplotype (e.g., a haplotype) and therefore is susceptible to prostate cancer.

[0201] In one preferred embodiment, a method utilizing a detection oligonucleotide probe comprising a fluorescent moiety or group at its 3′ terminus and a quencher at its 5′ terminus, and an enhancer oligonucleotide, is employed, as described by Kutyavin et al. (Nucleic Acid Res. 34:e128 (2006)). The fluorescent moiety can be Gig Harbor Green or Yakima Yellow, or other suitable fluorescent moieties. The detection probe is designed to hybridize to a short nucleotide sequence that includes the SNP polymorphism to be detected. Preferably, the SNP is anywhere from the terminal residue to −6 residues from the 3′ end of the detection probe. The enhancer is a short oligonucleotide probe which hybridizes to the DNA template 3′ relative to the detection probe. The probes are designed such that a single nucleotide gap exists between the detection probe and the enhancer nucleotide probe when both are bound to the template. The gap creates a synthetic abasic site that is recognized by an endonuclease, such as Endonuclease IV. The enzyme cleaves the dye off the fully complementary detection probe, but cannot cleave a detection probe containing a mismatch. Thus, by measuring the fluorescence of the released fluorescent moiety, assessment of the presence of a particular allele defined by nucleotide sequence of the detection probe can be performed.

[0202] The detection probe can be of any suitable size, although preferably the probe is relatively short. In one embodiment, the probe is from 5-100 nucleotides in length. In another embodiment, the probe is from 10-50 nucleotides in length, and in another embodiment, the probe is from 12-30 nucleotides in length. Other lengths of the probe are possible and within scope of the skill of the average person skilled in the art.

[0203] In a preferred embodiment, the DNA template containing the SNP polymorphism is amplified by Polymerase Chain Reaction (PCR) prior to detection. In such an embodiment, the amplified DNA serves as the template for the detection probe and the enhancer probe.

[0204] Certain embodiments of the detection probe, the enhancer probe, and/or the primers used for amplification of the template by PCR include the use of modified bases, including modified A and modified G. The use of modified bases can be useful for adjusting the melting temperature of the nucleotide molecule (probe and/or primer) to the template DNA, for example for increasing the melting temperature in regions containing a low percentage of G or C bases, in which modified A with the capability of forming three hydrogen bonds to its complementary T can be used, or for decreasing the melting temperature in regions containing a high percentage of G or C bases, for example by using modified G bases that form only two hydrogen bonds to their complementary C base in a double stranded DNA molecule. In a preferred embodiment, modified bases are used in the design of the detection nucleotide probe. Any modified base known to the skilled person can be selected in these methods, and the selection of suitable bases is well within the scope of the skilled person based on the teachings herein and known bases available from commercial sources as known to the skilled person.

[0205] Alternatively, a peptide nucleic acid (PNA) probe can be used in addition to, or instead of, a nucleic acid probe in the hybridization methods described herein. A PNA is a DNA mimic having a peptide-like, inorganic backbone, such as N-(2-aminoethyl)glycine units, with an organic base (A, G, C, T or U) attached to the glycine nitrogen via a methylene carbonyl linker (see, for example, Nielsen, P., et al., Bioconjug. Chem. 5:3-7 (1994)). The PNA probe can be designed to specifically hybridize to a molecule in a sample suspected of containing one or more of the marker alleles or haplotypes that are associated with prostate cancer. Hybridization of the PNA probe is thus diagnostic for prostate cancer or a susceptibility to prostate cancer.

[0206] In one embodiment of the invention, a test sample containing genomic DNA obtained from the subject is collected and the polymerase chain reaction (PCR) is used to amplify a fragment comprising one or more markers or haplotypes of the present invention. As described herein, identification of a particular marker allele or haplotype can be accomplished using a variety of methods (e.g., sequence analysis, analysis by restriction digestion, specific hybridization, single stranded conformation polymorphism assays (SSCP), electrophoretic analysis, etc.). In another embodiment, diagnosis is accomplished by expression analysis, for example by using quantitative PCR (kinetic thermal cycling). This technique can, for example, utilize commercially available technologies, such as TaqMan® (Applied Biosystems, Foster City, Calif.). The technique can assess the presence of an alteration in the expression or composition of a polypeptide or splicing variant(s). Further, the expression of the variant(s) can be quantified as physically or functionally different.

[0207] In another embodiment of the methods of the invention, analysis by restriction digestion can be used to detect a particular allele if the allele results in the creation or elimination of a restriction site relative to a reference sequence. Restriction fragment length polymorphism (RFLP) analysis can be conducted, e.g., as described in Current Protocols in Molecular Biology, supra. The digestion pattern of the relevant DNA fragment indicates the presence or absence of the particular allele in the sample.

[0208] Sequence analysis can also be used to detect specific alleles or haplotypes. Therefore, in one embodiment, determination of the presence or absence of a particular marker alleles or haplotypes comprises sequence analysis of a test sample of DNA or RNA obtained from a subject or individual. PCR or other appropriate methods can be used to amplify a portion of a nucleic acid that contains a polymorphic marker or haplotype, and the presence of specific alleles can then be detected directly by sequencing the polymorphic site (or multiple polymorphic sites in a haplotype) of the genomic DNA in the sample.

[0209] In another embodiment, arrays of oligonucleotide probes that are complementary to target nucleic acid sequence segments from a subject, can be used to identify particular alleles at polymorphic sites. For example, an oligonucleotide array can be used. Oligonucleotide arrays typically comprise a plurality of different oligonucleotide probes that are coupled to a surface of a substrate in different known locations. These arrays can generally be produced using mechanical synthesis methods or light directed synthesis methods that incorporate a combination of photolithographic methods and solid phase oligonucleotide synthesis methods, or by other methods known to the person skilled in the art (see, e.g., Bier, F. F., et al. Adv Biochem Eng Biotechnol 109:433-53 (2008); Hoheisel, J. D., Nat Rev Genet 7:200-10 (2006); Fan, J. B., et al. Methods Enzymol 410:57-73 (2006); Raqoussis, J. & Elvidge, G., Expert Rev Mol Diagn 6:145-52 (2006); Mockler, T. C., et al Genomics 85:1-15 (2005), and references cited therein, the entire teachings of each of which are incorporated by reference herein). Many additional descriptions of the preparation and use of oligonucleotide arrays for detection of polymorphisms can be found, for example, in U.S. Pat. No. 6,858,394, U.S. Pat. No. 6,429,027, U.S. Pat. No. 5,445,934, U.S. Pat. No. 5,700,637, U.S. Pat. No. 5,744,305, U.S. Pat. No. 5,945,334, U.S. Pat. No. 6,054,270, U.S. Pat. No. 6,300,063, U.S. Pat. No. 6,733,977, U.S. Pat. No. 7,364,858, EP 619 321, and EP 373 203, the entire teachings of which are incorporated by reference herein.

[0210] Other methods of nucleic acid analysis that are available to those skilled in the art can be used to detect a particular allele at a polymorphic site. Representative methods include, for example, direct manual sequencing (Church and Gilbert, Proc. Natl. Acad. Sci. USA, 81: 1991-1995 (1988); Sanger, F., et al., Proc. Natl. Acad. Sci. USA, 74:5463-5467 (1977); Beavis, et al., U.S. Pat. No. 5,288,644); automated fluorescent sequencing; single-stranded conformation polymorphism assays (SSCP); clamped denaturing gel electrophoresis (CDGE); denaturing gradient gel electrophoresis (DGGE) (Sheffield, V., et al., Proc. Natl. Acad. Sci. USA, 86:232-236 (1989)), mobility shift analysis (Orita, M., et al., Proc. Natl. Acad. Sci. USA, 86:2766-2770 (1989)), restriction enzyme analysis (Flavell, R., et al., Cell, 15:25-41 (1978); Geever, R., et al., Proc. Natl. Acad. Sci. USA, 78:5081-5085 (1981)); heteroduplex analysis; chemical mismatch cleavage (CMC) (Cotton, R., et al., Proc. Natl. Acad. Sci. USA, 85:4397-4401 (1985)); RNase protection assays (Myers, R., et al., Science, 230:1242-1246 (1985); use of polypeptides that recognize nucleotide mismatches, such as E. coli mutS protein; and allele-specific PCR.

[0211] In another embodiment of the invention, diagnosis of prostate cancer or a determination of a susceptibility to prostate cancer can be made by examining expression and/or composition of a polypeptide encoded by a nucleic acid associated with prostate cancer in those instances where the genetic marker(s) or haplotype(s) of the present invention result in a change in the composition or expression of the polypeptide. Thus, determination of a susceptibility to prostate cancer can be made by examining expression and/or composition of one of these polypeptides, or another polypeptide encoded by a nucleic acid associated with prostate cancer, in those instances where the genetic marker or haplotype of the present invention results in a change in the composition or expression of the polypeptide. The haplotypes and markers of the present invention that show association to prostate cancer may play a role through their effect on one or more of such nearby genes. In certain embodiments, markers or haplotype exerts its effect on the composition or expression on a gene selected from the group consisting of the EEFSEC gene, the SEC61A1 gene, the RUVBL1 gene, and the PPP1R14A gene. Possible mechanisms affecting these genes include, e.g., effects on transcription, effects on RNA splicing, alterations in relative amounts of alternative splice forms of mRNA, effects on RNA stability, effects on transport from the nucleus to cytoplasm, and effects on the efficiency and accuracy of translation.

[0212] Thus, in another embodiment, the variants (markers or haplotypes) presented herein affect the expression of a particular gene. It is well known that regulatory element affecting gene expression may be located far away, even as far as tenths or hundreds of kilobases away, from the promoter region of a gene. By assaying for the presence or absence of at least one allele of at least one polymorphic marker of the present invention, it is thus possible to assess the expression level of such nearby genes. It is thus contemplated that the detection of the markers or haplotypes of the present invention can be used for assessing expression for one or more genes whose expression is affected by the allelic and/or haplotype status at these markers and/or haplotypes (e.g., a gene selected from the group consisting of the EEFSEC gene, the SEC61A1 gene, the RUVBL1 gene, and the PPP1R14A gene).

[0213] A variety of methods can be used for detecting protein expression levels, including enzyme linked immunosorbent assays (ELISA), Western blots, immunoprecipitations and immunofluorescence. A test sample from a subject is assessed for the presence of an alteration in the expression and/or an alteration in composition of the polypeptide encoded by a particular nucleic acid. An alteration in expression of a polypeptide encoded by the nucleic acid can be, for example, an alteration in the quantitative polypeptide expression (i.e., the amount of polypeptide produced). An alteration in the composition of a polypeptide encoded by the nucleic acid is an alteration in the qualitative polypeptide expression (e.g., expression of a mutant polypeptide or of a different splicing variant). In one embodiment, diagnosis of a susceptibility to prostate cancer is made by detecting a particular splicing variant encoded by a nucleic acid associated with prostate cancer, or a particular pattern of splicing variants.

[0214] Both such alterations (quantitative and qualitative) can also be present. An “alteration” in the polypeptide expression or composition, as used herein, refers to an alteration in expression or composition in a test sample, as compared to the expression or composition of the polypeptide in a control sample. A control sample is a sample that corresponds to the test sample (e.g., is from the same type of cells), and is from a subject who is not affected by, and/or who does not have a susceptibility to, prostate cancer. In one embodiment, the control sample is from a subject that does not possess a marker allele or haplotype associated with prostate cancer, as described herein. Similarly, the presence of one or more different splicing variants in the test sample, or the presence of significantly different amounts of different splicing variants in the test sample, as compared with the control sample, can be indicative of a susceptibility to prostate cancer. An alteration in the expression or composition of the polypeptide in the test sample, as compared with the control sample, can be indicative of a specific allele in the instance where the allele alters a splice site relative to the reference in the control sample. Various means of examining expression or composition of a polypeptide encoded by a nucleic acid are known to the person skilled in the art and can be used, including spectroscopy, colorimetry, electrophoresis, isoelectric focusing, and immunoassays (e.g., David et al., U.S. Pat. No. 4,376,110) such as immunoblotting (see, e.g., Current Protocols in Molecular Biology, particularly chapter 10, supra).

[0215] For example, in one embodiment, an antibody (e.g., an antibody with a detectable label) that is capable of binding to a polypeptide encoded by a nucleic acid associated with prostate cancer can be used. Antibodies can be polyclonal or monoclonal. An intact antibody, or a fragment thereof (e.g., Fv, Fab, Fab′, F(ab′)₂) can be used. The term “labeled”, with regard to the probe or antibody, is intended to encompass direct labeling of the probe or antibody by coupling (i.e., physically linking) a detectable substance to the probe or antibody, as well as indirect labeling of the probe or antibody by reactivity with another reagent that is directly labeled. Examples of indirect labeling include detection of a primary antibody using a labeled secondary antibody (e.g., a fluorescently-labeled secondary antibody) and end-labeling of a DNA probe with biotin such that it can be detected with fluorescently-labeled streptavidin.

[0216] In one embodiment of this method, the level or amount of a polypeptide in a test sample is compared with the level or amount of the polypeptide in a control sample. A level or amount of the polypeptide in the test sample that is higher or lower than the level or amount of the polypeptide in the control sample, such that the difference is statistically significant, is indicative of an alteration in the expression of the polypeptide encoded by the nucleic acid, and is diagnostic for a particular allele or haplotype responsible for causing the difference in expression. Alternatively, the composition of the polypeptide in a test sample is compared with the composition of the polypeptide in a control sample. In another embodiment, both the level or amount and the composition of the polypeptide can be assessed in the test sample and in the control sample.

[0217] In another embodiment, determination of a susceptibility to prostate cancer is made by detecting at least one marker or haplotype of the present invention, in combination with an additional protein-based, RNA-based or DNA-based assay.

### Kits

[0218] Kits useful in the methods of the invention comprise components useful in any of the methods described herein, including for example, primers for nucleic acid amplification, hybridization probes, restriction enzymes (e.g., for RFLP analysis), allele-specific oligonucleotides, antibodies that bind to an altered polypeptide encoded by a nucleic acid of the invention as described herein (e.g., a genomic segment comprising at least one polymorphic marker and/or haplotype of the present invention) or to a non-altered (native) polypeptide encoded by a nucleic acid of the invention as described herein, means for amplification of a nucleic acid associated with prostate cancer, means for analyzing the nucleic acid sequence of a nucleic acid associated with prostate cancer, means for analyzing the amino acid sequence of a polypeptide encoded by a nucleic acid associated with prostate cancer, etc. The kits can for example include necessary buffers, nucleic acid primers for amplifying nucleic acids of the invention (e.g., a nucleic acid segment comprising one or more of the polymorphic markers as described herein), and reagents for allele-specific detection of the fragments amplified using such primers and necessary enzymes (e.g., dna polymerase). Additionally, kits can provide reagents for assays to be used in combination with the methods of the present invention, e.g., reagents for use with other diagnostic assays for prostate cancer.

[0219] In one embodiment, the invention pertains to a kit for assaying a sample from a subject to detect a susceptibility to prostate cancer in a subject, wherein the kit comprises reagents necessary for selectively detecting at least one allele of at least one polymorphism of the present invention in the genome of the individual. In a particular embodiment, the reagents comprise at least one contiguous oligonucleotide that hybridizes to a fragment of the genome of the individual comprising at least one polymorphism of the present invention. In another embodiment, the reagents comprise at least one pair of oligonucleotides that hybridize to opposite strands of a genomic segment obtained from a subject, wherein each oligonucleotide primer pair is designed to selectively amplify a fragment of the genome of the individual that includes at least one polymorphism associated with prostate cancer risk. In one such embodiment, the polymorphism is selected from the group consisting of the markers described herein to be associated with risk of prostate cancer, and polymorphic markers in linkage disequilibrium therewith. In yet another embodiment the fragment is at least 20 base pairs in size. Such oligonucleotides or nucleic acids (e.g., oligonucleotide primers) can be designed using portions of the nucleic acid sequence flanking polymorphisms (e.g., SNPs or microsatellites) that are associated with risk of prostate cancer. In another embodiment, the kit comprises one or more labeled nucleic acids capable of allele-specific detection of one or more specific polymorphic markers or haplotypes, and reagents for detection of the label. Suitable labels include, e.g., a radioisotope, a fluorescent label, an enzyme label, an enzyme co-factor label, a magnetic label, a spin label, an epitope label.

[0220] In particular embodiments, the polymorphic marker or haplotype to be detected by the reagents of the kit comprises one or more markers, two or more markers, three or more markers, four or more markers or five or more markers selected from the group consisting of the markers rs445114, rs8102476, rs10934853 and rs16902094, and markers in linkage disequilibrium therewith. In another embodiment, the marker or haplotype to be detected comprises one or more markers, two or more markers, three or more markers, four or more markers or five or more markers selected from the group consisting of the markers set forth in Tables 8, 9, 10, 11, 17, 18, 19 and 20 herein. In another embodiment, the marker or haplotype to be detected comprises at least one marker from the group of markers in strong linkage disequilibrium, as defined by values of r² greater than 0.2, to at least one of the group of markers listed in Tables 8, 9, 10, 11, 17, 18, 19 and 20 herein. In another embodiment, the marker or haplotype to be detected is selected from the group consisting of rs445114, rs8102476, rs10934853, rs16902094, rs16902104, and rs620861.

[0221] In one preferred embodiment, the kit for detecting the markers of the invention comprises a detection oligonucleotide probe, that hybridizes to a segment of template DNA containing a SNP polymorphisms to be detected, an enhancer oligonucleotide probe and an endonuclease. As explained in the above, the detection oligonucleotide probe comprises a fluorescent moiety or group at its 3′ terminus and a quencher at its 5′ terminus, and an enhancer oligonucleotide, is employed, as described by Kutyavin et al. (Nucleic Acid Res. 34:e128 (2006)). The fluorescent moiety can be Gig Harbor Green or Yakima Yellow, or other suitable fluorescent moieties. The detection probe is designed to hybridize to a short nucleotide sequence that includes the SNP polymorphism to be detected. Preferably, the SNP is anywhere from the terminal residue to −6 residues from the 3′ end of the detection probe. The enhancer is a short oligonucleotide probe which hybridizes to the DNA template 3′ relative to the detection probe. The probes are designed such that a single nucleotide gap exists between the detection probe and the enhancer nucleotide probe when both are bound to the template. The gap creates a synthetic abasic site that is recognized by an endonuclease, such as Endonuclease IV. The enzyme cleaves the dye off the fully complementary detection probe, but cannot cleave a detection probe containing a mismatch. Thus, by measuring the fluorescence of the released fluorescent moiety, assessment of the presence of a particular allele defined by nucleotide sequence of the detection probe can be performed.

[0222] The detection probe can be of any suitable size, although preferably the probe is relatively short. In one embodiment, the probe is from 5-100 nucleotides in length. In another embodiment, the probe is from 10-50 nucleotides in length, and in another embodiment, the probe is from 12-30 nucleotides in length. Other lengths of the probe are possible and within scope of the skill of the average person skilled in the art.

[0223] In a preferred embodiment, the DNA template containing the SNP polymorphism is amplified by Polymerase Chain Reaction (PCR) prior to detection, and primers for such amplification are included in the reagent kit. In such an embodiment, the amplified DNA serves as the template for the detection probe and the enhancer probe.

[0224] In one embodiment, the DNA template is amplified by means of Whole Genome Amplification (WGA) methods, prior to assessment for the presence of specific polymorphic markers as described herein. Standard methods well known to the skilled person for performing WGA may be utilized, and are within scope of the invention. In one such embodiment, reagents for performing WGA are included in the reagent kit.

[0225] Certain embodiments of the detection probe, the enhancer probe, and/or the primers used for amplification of the template by PCR include the use of modified bases, including modified A and modified G. The use of modified bases can be useful for adjusting the melting temperature of the nucleotide molecule (probe and/or primer) to the template DNA, for example for increasing the melting temperature in regions containing a low percentage of G or C bases, in which modified A with the capability of forming three hydrogen bonds to its complementary T can be used, or for decreasing the melting temperature in regions containing a high percentage of G or C bases, for example by using modified G bases that form only two hydrogen bonds to their complementary C base in a double stranded DNA molecule. In a preferred embodiment, modified bases are used in the design of the detection nucleotide probe. Any modified base known to the skilled person can be selected in these methods, and the selection of suitable bases is well within the scope of the skilled person based on the teachings herein and known bases available from commercial sources as known to the skilled person.

[0226] In one such embodiment, determination of the presence of the marker or haplotype is indicative of a susceptibility (increased susceptibility or decreased susceptibility) to prostate cancer. In another embodiment, determination of the presence of the marker or haplotype is indicative of response to a therapeutic agent for prostate cancer. In another embodiment, the presence of the marker or haplotype is indicative of prostate cancer prognosis. In yet another embodiment, the presence of the marker or haplotype is indicative of progress of prostate cancer treatment. Such treatment may include intervention by surgery, medication or by other means (e.g., lifestyle changes).

[0227] In a further aspect of the present invention, a pharmaceutical pack (kit) is provided, the pack comprising a therapeutic agent and a set of instructions for administration of the therapeutic agent to humans diagnostically tested for one or more variants of the present invention, as disclosed herein. The therapeutic agent can be a small molecule drug, an antibody, a peptide, an antisense or rnai molecule, or other therapeutic molecules. In one embodiment, an individual identified as a carrier of at least one variant of the present invention is instructed to take a prescribed dose of the therapeutic agent. In one such embodiment, an individual identified as a homozygous carrier of at least one variant of the present invention is instructed to take a prescribed dose of the therapeutic agent. In another embodiment, an individual identified as a non-carrier of at least one variant of the present invention is instructed to take a prescribed dose of the therapeutic agent.

[0228] In certain embodiments, the kit further comprises a set of instructions for using the reagents comprising the kit. In certain embodiments, the kit further comprises a collection of data comprising correlation data between the polymorphic markers assessed by the kit and susceptibility to prostate cancer and/or colorectal cancer.

### Therapeutic Agents

[0229] The variants (markers and/or haplotypes) disclosed herein to confer increased risk of prostate cancer can also be used to identify novel therapeutic targets for prostate cancer. For example, genes containing, or in linkage disequilibrium with, one or more of these variants, or their products, as well as genes or their products that are directly or indirectly regulated by or interact with these variant genes or their products, can be targeted for the development of therapeutic agents to treat prostate cancer, or prevent or delay onset of symptoms associated with prostate cancer. Therapeutic agents may comprise one or more of, for example, small non-protein and non-nucleic acid molecules, proteins, peptides, protein fragments, nucleic acids (dna, rna), pna (peptide nucleic acids), or their derivatives or mimetics which can modulate the function and/or levels of the target genes or their gene products.

[0230] The nucleic acids and/or variants described herein, or nucleic acids comprising their complementary sequence, may be used as antisense constructs to control gene expression in cells, tissues or organs. The methodology associated with antisense techniques is well known to the skilled artisan, and is for example described and reviewed in AntisenseDrug Technology: Principles, Strategies, and Applications, Crooke, ed., Marcel Dekker Inc., New York (2001). In general, antisense agents (antisense oligonucleotides) are comprised of single stranded oligonucleotides (RNA or DNA) that are capable of binding to a complimentary nucleotide segment. By binding the appropriate target sequence, an RNA-RNA, DNA-DNA or RNA-DNA duplex is formed. The antisense oligonucleotides are complementary to the sense or coding strand of a gene. It is also possible to form a triple helix, where the antisense oligonucleotide binds to duplex DNA.

[0231] Several classes of antisense oligonucleotide are known to those skilled in the art, including cleavers and blockers. The former bind to target RNA sites, activate intracellular nucleases (e.g., RnaseH or Rnase L), that cleave the target RNA. Blockers bind to target RNA, inhibit protein translation by steric hindrance of the ribosomes. Examples of blockers include nucleic acids, morpholino compounds, locked nucleic acids and methylphosphonates (Thompson, Drug Discovery Today, 7:912-917 (2002)). Antisense oligonucleotides are useful directly as therapeutic agents, and are also useful for determining and validating gene function, for example by gene knock-out or gene knock-down experiments. Antisense technology is further described in Layery et al., Curr. Opin. Drug Discov. Devel. 6:561-569 (2003), Stephens et al., Curr. Opin. Mol. Ther. 5:118-122 (2003), Kurreck, Eur. J. Biochem. 270:1628-44 (2003), Dias et al., Mol. Cancer Ter. 1:347-55 (2002), Chen, Methods Mol. Med. 75:621-636 (2003), Wang et al., Curr. Cancer Drug Targets 1:177-96 (2001), and Bennett, Antisense Nucleic Acid Drug. Dev. 12:215-24 (2002).

[0232] In certain embodiments, the antisense agent is an oligonucleotide that is capable of binding to a nucleotide segment of the gene (e.g., the EEFSEC gene, the SEC61A1 gene, the RUVBL1 gene, or the PPP1R14A gene). Antisense nucleotides can be from 5-500 nucleotides in length, including 5-200 nucleotides, 5-100 nucleotides, 10-50 nucleotides, and 10-30 nucleotides. In certain preferred embodiments, the antisense nucleotides is from 14-50 nucleotides in length, including 14-40 nucleotides and 14-30 nucleotides. In certain such embodiments, the antisense nucleotide is capable of binding to a nucleotide segment with sequence as set forth in any one of SEQ ID NO:1-978.

[0233] The variants described herein can also be used for the selection and design of antisense reagents that are specific for particular variants. Using information about the variants described herein, antisense oligonucleotides or other antisense molecules that specifically target mRNA molecules that contain one or more variants of the invention can be designed. In this manner, expression of mRNA molecules that contain one or more variant of the present invention (markers and/or haplotypes) can be inhibited or blocked. In one embodiment, the antisense molecules are designed to specifically bind a particular allelic form (i.e., one or several variants (alleles and/or haplotypes)) of the target nucleic acid, thereby inhibiting translation of a product originating from this specific allele or haplotype, but which do not bind other or alternate variants at the specific polymorphic sites of the target nucleic acid molecule. As antisense molecules can be used to inactivate mRNA so as to inhibit gene expression, and thus protein expression, the molecules can be used for disease treatment. The methodology can involve cleavage by means of ribozymes containing nucleotide sequences complementary to one or more regions in the mRNA that attenuate the ability of the mRNA to be translated. Such mRNA regions include, for example, protein-coding regions, in particular protein-coding regions corresponding to catalytic activity, substrate and/or ligand binding sites, or other functional domains of a protein.

[0234] The phenomenon of RNA interference (RNAi) has been actively studied for the last decade, since its original discovery in C. elegans (Fire et al., Nature 391:806-11 (1998)), and in recent years its potential use in treatment of human disease has been actively pursued (reviewed in Kim & Rossi, Nature Rev. Genet. 8:173-204 (2007)). RNA interference (RNAi), also called gene silencing, is based on using double-stranded RNA molecules (dsRNA) to turn off specific genes. In the cell, cytoplasmic double-stranded RNA molecules (dsRNA) are processed by cellular complexes into small interfering RNA (siRNA). The siRNA guide the targeting of a protein-RNA complex to specific sites on a target mRNA, leading to cleavage of the mRNA (Thompson, Drug Discovery Today, 7:912-917 (2002)). The siRNA molecules are typically about 20, 21, 22 or 23 nucleotides in length. Thus, one aspect of the invention relates to isolated nucleic acid molecules, and the use of those molecules for RNA interference, i.e. as small interfering RNA molecules (siRNA). In one embodiment, the isolated nucleic acid molecules are 18-26 nucleotides in length, preferably 19-25 nucleotides in length, more preferably 20-24 nucleotides in length, and more preferably 21, 22 or 23 nucleotides in length.

[0235] Another pathway for RNAi-mediated gene silencing originates in endogenously encoded primary microRNA (pri-miRNA) transcripts, which are processed in the cell to generate precursor miRNA (pre-miRNA). These miRNA molecules are exported from the nucleus to the cytoplasm, where they undergo processing to generate mature miRNA molecules (miRNA), which direct translational inhibition by recognizing target sites in the 3′ untranslated regions of mRNAs, and subsequent mRNA degradation by processing P-bodies (reviewed in Kim & Rossi, Nature Rev. Genet. 8:173-204 (2007)).

[0236] Clinical applications of RNAi include the incorporation of synthetic siRNA duplexes, which preferably are approximately 20-23 nucleotides in size, and preferably have 3′ overlaps of 2 nucleotides. Knockdown of gene expression is established by sequence-specific design for the target mRNA. Several commercial sites for optimal design and synthesis of such molecules are known to those skilled in the art.

[0237] Other applications provide longer siRNA molecules (typically 25-30 nucleotides in length, preferably about 27 nucleotides), as well as small hairpin RNAs (shRNAs; typically about 29 nucleotides in length). The latter are naturally expressed, as described in Amarzguioui et al. (FEBS Lett. 579:5974-81 (2005)). Chemically synthetic siRNAs and shRNAs are substrates for in vivo processing, and in some cases provide more potent gene-silencing than shorter designs (Kim et al., Nature Biotechnol. 23:222-226 (2005); Siolas et al., Nature Biotechnol. 23:227-231 (2005)). In general siRNAs provide for transient silencing of gene expression, because their intracellular concentration is diluted by subsequent cell divisions. By contrast, expressed shRNAs mediate long-term, stable knockdown of target transcripts, for as long as transcription of the shRNA takes place (Marques et al., Nature Biotechnol. 23:559-565 (2006); Brummelkamp et al., Science 296: 550-553 (2002)).

[0238] Since RNAi molecules, including siRNA, miRNA and shRNA, act in a sequence-dependent manner, the variants presented herein can be used to design RNAi reagents that recognize specific nucleic acid molecules comprising specific alleles and/or haplotypes (e.g., the alleles and/or haplotypes of the present invention), while not recognizing nucleic acid molecules comprising other alleles or haplotypes. These RNAi reagents can thus recognize and destroy the target nucleic acid molecules. As with antisense reagents, RNAi reagents can be useful as therapeutic agents (i.e., for turning off disease-associated genes or disease-associated gene variants), but may also be useful for characterizing and validating gene function (e.g., by gene knock-out or gene knock-down experiments).

[0239] Delivery of RNAi may be performed by a range of methodologies known to those skilled in the art. Methods utilizing non-viral delivery include cholesterol, stable nucleic acid-lipid particle (SNALP), heavy-chain antibody fragment (Fab), aptamers and nanoparticles. Viral delivery methods include use of lentivirus, adenovirus and adeno-associated virus. The siRNA molecules are in some embodiments chemically modified to increase their stability. This can include modifications at the 2′ position of the ribose, including 2′-O-methylpurines and 2′-fluoropyrimidines, which provide resistance to Rnase activity. Other chemical modifications are possible and known to those skilled in the art.

[0240] The following references provide a further summary of RNAi, and possibilities for targeting specific genes using RNAi: Kim & Rossi, Nat. Rev. Genet. 8:173-184 (2007), Chen & Rajewsky, Nat. Rev. Genet. 8: 93-103 (2007), Reynolds, et al., Nat. Biotechnol. 22:326-330 (2004), Chi et al., Proc. Natl. Acad. Sci. USA 100:6343-6346 (2003), Vickers et al., J. Biol. Chem. 278:7108-7118 (2003), Agami, Curr. Opin. Chem. Biol. 6:829-834 (2002), Layery, et al., Curr. Opin. Drug Discov. Devel. 6:561-569 (2003), Shi, Trends Genet. 19:9-12 (2003), Shuey et al., Drug Discov. Today 7:1040-46 (2002), McManus et al., Nat. Rev. Genet. 3:737-747 (2002), Xia et al., Nat. Biotechnol. 20:1006-10 (2002), Plasterk et al., curr. Opin. Genet. Dev. 10:562-7 (2000), Bosher et al., Nat. Cell Biol. 2:E31-6 (2000), and Hunter, Curr. Biol. 9:R440-442 (1999).

[0241] A genetic defect leading to increased predisposition or risk for development of a disease, such as prostate cancer, or a defect causing the disease, may be corrected permanently by administering to a subject carrying the defect a nucleic acid fragment that incorporates a repair sequence that supplies the normal/wild-type nucleotide(s) at the site of the genetic defect. Such site-specific repair sequence may concompass an RNA/DNA oligonucleotide that operates to promote endogenous repair of a subject's genomic DNA. The administration of the repair sequence may be performed by an appropriate vehicle, such as a complex with polyethelenimine, encapsulated in anionic liposomes, a viral vector such as an adenovirus vector, or other pharmaceutical compositions suitable for promoting intracellular uptake of the adminstered nucleic acid. The genetic defect may then be overcome, since the chimeric oligonucleotides induce the incorporation of the normal sequence into the genome of the subject, leading to expression of the normal/wild-type gene product. The replacement is propagated, thus rendering a permanent repair and alleviation of the symptoms associated with the disease or condition.

[0242] The present invention provides methods for identifying compounds or agents that can be used to treat prostate cancer. In certain embodiments, such methods include assaying the ability of an agent or compound to modulate the activity and/or expression of a nucleic acid that includes at least one of the variants (markers and/or haplotypes) of the present invention, or the encoded product of the nucleic acid. This in turn can be used to identify agents or compounds that inhibit or alter the undesired activity or expression of the encoded nucleic acid product. Assays for performing such experiments can be performed in cell-based systems or in cell-free systems, as known to the skilled person. Cell-based systems include cells naturally expressing the nucleic acid molecules of interest, or recombinant cells that have been genetically modified so as to express a certain desired nucleic acid molecule.

[0243] Variant gene expression in a patient can be assessed by expression of a variant-containing nucleic acid sequence (for example, a gene containing at least one variant of the present invention, which can be transcribed into RNA containing the at least one variant, and in turn translated into protein), or by altered expression of a normal/wild-type nucleic acid sequence due to variants affecting the level or pattern of expression of the normal transcripts, for example variants in the regulatory or control region of the gene. Assays for gene expression include direct nucleic acid assays (mRNA), assays for expressed protein levels, or assays of collateral compounds involved in a pathway, for example a signal pathway. Furthermore, the expression of genes that are up- or down-regulated in response to the signal pathway can also be assayed. One embodiment includes operably linking a reporter gene, such as luciferase, to the regulatory region of the gene(s) of interest.

[0244] Modulators of gene expression can in one embodiment be identified when a cell is contacted with a candidate compound or agent, and the expression of mRNA is determined. The expression level of mRNA in the presence of the candidate compound or agent is compared to the expression level in the absence of the compound or agent. Based on this comparison, candidate compounds or agents for treating prostate cancer can be identified as those modulating the gene expression of the variant gene. When expression of mRNA or the encoded protein is statistically significantly greater in the presence of the candidate compound or agent than in its absence, then the candidate compound or agent is identified as a stimulator or up-regulator of expression of the nucleic acid. When nucleic acid expression or protein level is statistically significantly less in the presence of the candidate compound or agent than in its absence, then the candidate compound is identified as an inhibitor or down-regulator of the nucleic acid expression.

[0245] The invention further provides methods of treatment using a compound identified through drug (compound and/or agent) screening as a gene modulator (i.e. stimulator and/or inhibitor of gene expression).

### Methods of Assessing Probability of Response to Therapeutic Agents, Methods of Monitoring Progress of Treatment and Methods of Treatment

[0246] As is known in the art, individuals can have differential responses to a particular therapy (e.g., a therapeutic agent or therapeutic method). Pharmacogenomics addresses the issue of how genetic variations (e.g., the variants (markers and/or haplotypes) of the present invention) affect drug response, due to altered drug disposition and/or abnormal or altered action of the drug. Thus, the basis of the differential response may be genetically determined in part. Clinical outcomes due to genetic variations affecting drug response may result in toxicity of the drug in certain individuals (e.g., carriers or non-carriers of the genetic variants of the present invention), or therapeutic failure of the drug. Therefore, the variants of the present invention may determine the manner in which a therapeutic agent and/or therapeutic method acts on the body, or the way in which the body metabolizes the therapeutic agent.

[0247] Accordingly, in one embodiment, the presence of a particular allele at a polymorphic site or haplotype is indicative of a different response, e.g. a different response rate, to a particular treatment modality for prostate cancer. This means that a patient diagnosed with prostate cancer, and carrying a certain allele at a polymorphic or haplotype of the present invention (e.g., the at-risk and protective alleles and/or haplotypes of the invention) would respond better to, or worse to, a specific therapeutic, drug and/or other therapy used to treat the disease. Therefore, the presence or absence of the marker allele or haplotype could aid in deciding what treatment should be used for a the patient. For example, for a newly diagnosed patient, the presence of a marker or haplotype of the present invention may be assessed (e.g., through testing DNA derived from a blood sample, as described herein). If the patient is positive for a marker allele or haplotype (that is, at least one specific allele of the marker, or haplotype, is present), then the physician recommends one particular therapy, while if the patient is negative for the at least one allele of a marker, or a haplotype, then a different course of therapy may be recommended (which may include recommending that no immediate therapy, other than serial monitoring for progression of the disease, be performed). Thus, the patient's carrier status could be used to help determine whether a particular treatment modality should be administered. The value lies within the possibilities of being able to diagnose the disease at an early stage, to select the most appropriate treatment, and provide information to the clinician about prognosis/aggressiveness of the disease in order to be able to apply the most appropriate treatment.

[0248] In certain embodiments, assessment of the genetic status of an individual for genetic susceptibility markers for prostate cancer, e.g. the markers as described herein, is combined with assessment or assessment results for a biomarker indicative of prostate cancer, such as Prostate Specific Antigen (PSA).

[0249] The present invention also relates to methods of monitoring progress or effectiveness of a treatment for prostate cancer. This can be done based on the genotype and/or haplotype status of the markers and haplotypes of the present invention, i.e., by assessing the absence or presence of at least one allele of at least one polymorphic marker as disclosed herein, or by monitoring expression of genes that are associated with the variants (markers and haplotypes) of the present invention. The risk gene mRNA or the encoded polypeptide can be measured in a tissue sample (e.g., a peripheral blood sample, or a biopsy sample). Expression levels and/or mRNA levels can thus be determined before and during treatment to monitor its effectiveness. Alternatively, or concomitantly, the genotype and/or haplotype status of at least one risk variant for prostate cancer as presented herein is determined before and during treatment to monitor its effectiveness.

[0250] Alternatively, biological networks or metabolic pathways related to the markers and haplotypes of the present invention can be monitored by determining mRNA and/or polypeptide levels. This can be done for example, by monitoring expression levels or polypeptides for several genes belonging to the network and/or pathway, in samples taken before and during treatment. Alternatively, metabolites belonging to the biological network or metabolic pathway can be determined before and during treatment. Effectiveness of the treatment is determined by comparing observed changes in expression levels/metabolite levels during treatment to corresponding data from healthy subjects.

[0251] In a further aspect, the markers of the present invention can be used to increase power and effectiveness of clinical trials. Thus, individuals who are carriers of at least one at-risk variant of the present invention may be more likely to respond favorably to a particular treatment modality. In one embodiment, individuals who carry at-risk variants for gene(s) in a pathway and/or metabolic network for which a particular treatment (e.g., small molecule drug) is targeting, are more likely to be responders to the treatment. In another embodiment, individuals who carry at-risk variants for a gene, which expression and/or function is altered by the at-risk variant, are more likely to be responders to a treatment modality targeting that gene, its expression or its gene product. This application can improve the safety of clinical trials, but can also enhance the chance that a clinical trial will demonstrate statistically significant efficacy, which may be limited to a certain sub-group of the population. Thus, one possible outcome of such a trial is that carriers of certain genetic variants, e.g., the markers and haplotypes of the present invention, are statistically significantly likely to show positive response to the therapeutic agent, i.e. experience alleviation of symptoms associated with prostate cancer when taking the therapeutic agent or drug as prescribed.

[0252] In a further aspect, the markers and haplotypes of the present invention can be used for targeting the selection of pharmaceutical agents for specific individuals. Personalized selection of treatment modalities, lifestyle changes or combination of lifestyle changes and administration of particular treatment, can be realized by the utilization of the at-risk variants of the present invention. Thus, the knowledge of an individual's status for particular markers of the present invention, can be useful for selection of treatment options that target genes or gene products affected by the at-risk variants of the invention. Certain combinations of variants may be suitable for one selection of treatment options, while other gene variant combinations may target other treatment options. Such combination of variant may include one variant, two variants, three variants, or four or more variants, as needed to determine with clinically reliable accuracy the selection of treatment module.

### Computer-Implemented Aspects

[0253] As understood by those of ordinary skill in the art, the methods and information described herein may be implemented, in all or in part, as computer executable instructions on known computer readable media. For example, the methods described herein may be implemented in hardware. Alternatively, the method may be implemented in software stored in, for example, one or more memories or other computer readable medium and implemented on one or more processors. As is known, the processors may be associated with one or more controllers, calculation units and/or other units of a computer system, or implanted in firmware as desired. If implemented in software, the routines may be stored in any computer readable memory such as in RAM, ROM, flash memory, a magnetic disk, a laser disk, or other storage medium, as is also known. Likewise, this software may be delivered to a computing device via any known delivery method including, for example, over a communication channel such as a telephone line, the Internet, a wireless connection, etc., or via a transportable medium, such as a computer readable disk, flash drive, etc.

[0254] More generally, and as understood by those of ordinary skill in the art, the various steps described above may be implemented as various blocks, operations, tools, modules and techniques which, in turn, may be implemented in hardware, firmware, software, or any combination of hardware, firmware, and/or software. When implemented in hardware, some or all of the blocks, operations, techniques, etc. may be implemented in, for example, a custom integrated circuit (IC), an application specific integrated circuit (ASIC), a field programmable logic array (FPGA), a programmable logic array (PLA), etc.

[0255] When implemented in software, the software may be stored in any known computer readable medium such as on a magnetic disk, an optical disk, or other storage medium, in a RAM or ROM or flash memory of a computer, processor, hard disk drive, optical disk drive, tape drive, etc. Likewise, the software may be delivered to a user or a computing system via any known delivery method including, for example, on a computer readable disk or other transportable computer storage mechanism.

[0256] FIG. 1 illustrates an example of a suitable computing system environment 100 on which a system for the steps of the claimed method and apparatus may be implemented. The computing system environment 100 is only one example of a suitable computing environment and is not intended to suggest any limitation as to the scope of use or functionality of the method or apparatus of the claims. Neither should the computing environment 100 be interpreted as having any dependency or requirement relating to any one or combination of components illustrated in the exemplary operating environment 100.

[0257] The steps of the claimed method and system are operational with numerous other general purpose or special purpose computing system environments or configurations. Examples of well known computing systems, environments, and/or configurations that may be suitable for use with the methods or system of the claims include, but are not limited to, personal computers, server computers, hand-held or laptop devices, multiprocessor systems, microprocessor-based systems, set top boxes, programmable consumer electronics, network PCs, minicomputers, mainframe computers, distributed computing environments that include any of the above systems or devices, and the like.

[0258] The steps of the claimed method and system may be described in the general context of computer-executable instructions, such as program modules, being executed by a computer. Generally, program modules include routines, programs, objects, components, data structures, etc. that perform particular tasks or implement particular abstract data types. The methods and apparatus may also be practiced in distributed computing environments where tasks are performed by remote processing devices that are linked through a communications network. In both integrated and distributed computing environments, program modules may be located in both local and remote computer storage media including memory storage devices.

[0259] With reference to FIG. 1, an exemplary system for implementing the steps of the claimed method and system includes a general purpose computing device in the form of a computer 110. Components of computer 110 may include, but are not limited to, a processing unit 120, a system memory 130, and a system bus 121 that couples various system components including the system memory to the processing unit 120. The system bus 121 may be any of several types of bus structures including a memory bus or memory controller, a peripheral bus, and a local bus using any of a variety of bus architectures. By way of example, and not limitation, such architectures include Industry Standard Architecture (ISA) bus, Micro Channel Architecture (MCA) bus, Enhanced ISA (EISA) bus, Video Electronics Standards Association (VESA) local bus, and Peripheral Component Interconnect (PCI) bus also known as Mezzanine bus.

[0260] Computer 110 typically includes a variety of computer readable media. Computer readable media can be any available media that can be accessed by computer 110 and includes both volatile and nonvolatile media, removable and non-removable media. By way of example, and not limitation, computer readable media may comprise computer storage media and communication media. Computer storage media includes both volatile and nonvolatile, removable and non-removable media implemented in any method or technology for storage of information such as computer readable instructions, data structures, program modules or other data. Computer storage media includes, but is not limited to, RAM, ROM, EEPROM, flash memory or other memory technology, CD-ROM, digital versatile disks (DVD) or other optical disk storage, magnetic cassettes, magnetic tape, magnetic disk storage or other magnetic storage devices, or any other medium which can be used to store the desired information and which can accessed by computer 110. Communication media typically embodies computer readable instructions, data structures, program modules or other data in a modulated data signal such as a carrier wave or other transport mechanism and includes any information delivery media. The term “modulated data signal” means a signal that has one or more of its characteristics set or changed in such a manner as to encode information in the signal. By way of example, and not limitation, communication media includes wired media such as a wired network or direct-wired connection, and wireless media such as acoustic, RF, infrared and other wireless media. Combinations of the any of the above should also be included within the scope of computer readable media.

[0261] The system memory 130 includes computer storage media in the form of volatile and/or nonvolatile memory such as read only memory (ROM) 131 and random access memory (RAM) 132. A basic input/output system 133 (BIOS), containing the basic routines that help to transfer information between elements within computer 110, such as during start-up, is typically stored in ROM 131. RAM 132 typically contains data and/or program modules that are immediately accessible to and/or presently being operated on by processing unit 120. By way of example, and not limitation, FIG. 1 illustrates operating system 134, application programs 135, other program modules 136, and program data 137.

[0262] The computer 110 may also include other removable/non-removable, volatile/nonvolatile computer storage media. By way of example only, FIG. 1 illustrates a hard disk drive 140 that reads from or writes to non-removable, nonvolatile magnetic media, a magnetic disk drive 151 that reads from or writes to a removable, nonvolatile magnetic disk 152, and an optical disk drive 155 that reads from or writes to a removable, nonvolatile optical disk 156 such as a CD ROM or other optical media. Other removable/non-removable, volatile/nonvolatile computer storage media that can be used in the exemplary operating environment include, but are not limited to, magnetic tape cassettes, flash memory cards, digital versatile disks, digital video tape, solid state RAM, solid state ROM, and the like. The hard disk drive 141 is typically connected to the system bus 121 through a non-removable memory interface such as interface 140, and magnetic disk drive 151 and optical disk drive 155 are typically connected to the system bus 121 by a removable memory interface, such as interface 150.

[0263] The drives and their associated computer storage media discussed above and illustrated in FIG. 1, provide storage of computer readable instructions, data structures, program modules and other data for the computer 110. In FIG. 1, for example, hard disk drive 141 is illustrated as storing operating system 144, application programs 145, other program modules 146, and program data 147. Note that these components can either be the same as or different from operating system 134, application programs 135, other program modules 136, and program data 137. Operating system 144, application programs 145, other program modules 146, and program data 147 are given different numbers here to illustrate that, at a minimum, they are different copies. A user may enter commands and information into the computer 20 through input devices such as a keyboard 162 and pointing device 161, commonly referred to as a mouse, trackball or touch pad. Other input devices (not shown) may include a microphone, joystick, game pad, satellite dish, scanner, or the like. These and other input devices are often connected to the processing unit 120 through a user input interface 160 that is coupled to the system bus, but may be connected by other interface and bus structures, such as a parallel port, game port or a universal serial bus (USB). A monitor 191 or other type of display device is also connected to the system bus 121 via an interface, such as a video interface 190. In addition to the monitor, computers may also include other peripheral output devices such as speakers 197 and printer 196, which may be connected through an output peripheral interface 190.

[0264] The computer 110 may operate in a networked environment using logical connections to one or more remote computers, such as a remote computer 180. The remote computer 180 may be a personal computer, a server, a router, a network PC, a peer device or other common network node, and typically includes many or all of the elements described above relative to the computer 110, although only a memory storage device 181 has been illustrated in FIG. 1. The logical connections depicted in FIG. 1 include a local area network (LAN) 171 and a wide area network (WAN) 173, but may also include other networks. Such networking environments are commonplace in offices, enterprise-wide computer networks, intranets and the Internet.

[0265] When used in a LAN networking environment, the computer 110 is connected to the LAN 171 through a network interface or adapter 170. When used in a WAN networking environment, the computer 110 typically includes a modem 172 or other means for establishing communications over the WAN 173, such as the Internet. The modem 172, which may be internal or external, may be connected to the system bus 121 via the user input interface 160, or other appropriate mechanism. In a networked environment, program modules depicted relative to the computer 110, or portions thereof, may be stored in the remote memory storage device. By way of example, and not limitation, FIG. 1 illustrates remote application programs 185 as residing on memory device 181. It will be appreciated that the network connections shown are exemplary and other means of establishing a communications link between the computers may be used.

[0266] Although the forgoing text sets forth a detailed description of numerous different embodiments of the invention, it should be understood that the scope of the invention is defined by the words of the claims set forth at the end of this patent. The detailed description is to be construed as exemplary only and does not describe every possibly embodiment of the invention because describing every possible embodiment would be impractical, if not impossible. Numerous alternative embodiments could be implemented, using either current technology or technology developed after the filing date of this patent, which would still fall within the scope of the claims defining the invention.

[0267] While the risk evaluation system and method, and other elements, have been described as preferably being implemented in software, they may be implemented in hardware, firmware, etc., and may be implemented by any other processor. Thus, the elements described herein may be implemented in a standard multi-purpose CPU or on specifically designed hardware or firmware such as an application-specific integrated circuit (ASIC) or other hard-wired device as desired, including, but not limited to, the computer 110 of FIG. 1. When implemented in software, the software routine may be stored in any computer readable memory such as on a magnetic disk, a laser disk, or other storage medium, in a RAM or ROM of a computer or processor, in any database, etc. Likewise, this software may be delivered to a user or a diagnostic system via any known or desired delivery method including, for example, on a computer readable disk or other transportable computer storage mechanism or over a communication channel such as a telephone line, the internet, wireless communication, etc. (which are viewed as being the same as or interchangeable with providing such software via a transportable storage medium).

[0268] Thus, many modifications and variations may be made in the techniques and structures described and illustrated herein without departing from the spirit and scope of the present invention. Thus, it should be understood that the methods and apparatus described herein are illustrative only and are not limiting upon the scope of the invention.

[0269] Accordingly, the invention relates to computer-implemented applications using the polymorphic markers and haplotypes described herein, and genotype and/or disease-association data derived therefrom. Such applications can be useful for storing, manipulating or otherwise analyzing genotype data that is useful in the methods of the invention. One example pertains to storing genotype information derived from an individual on readable media, so as to be able to provide the genotype information to a third party (e.g., the individual, a guardian of the individual, a health care provider or genetic analysis service provider), or for deriving information from the genotype data, e.g., by comparing the genotype data to information about genetic risk factors contributing to increased susceptibility to the prostate cancer, and reporting results based on such comparison.

[0270] In certain embodiments, computer-readable media suitably comprise capabilities of storing (i) identifier information for at least one polymorphic marker or a haplotype, as described herein; (ii) an indicator of the identity (e.g., presence or absence) of at least one allele of said at least one marker, or a haplotype, in individuals with prostate cancer; and (iii) an indicator of the risk associated with the marker allele or haplotype.

[0271] The markers and haplotypes described herein to be associated with increased susceptibility (increased risk) of prostate cancer, are in certain embodiments useful for interpretation and/or analysis of genotype data. Thus in certain embodiments, determination of the presence of an at-risk allele for prostate cancer, as shown herein, or determination of the presence of an allele at a polymorphic marker in LD with any such risk allele, is indicative of the individual from whom the genotype data originates is at increased risk of prostate cancer. In one such embodiment, genotype data is generated for at least one polymorphic marker shown herein to be associated with prostate cancer, or a marker in linkage disequilibrium therewith. The genotype data is subsequently made available to a third party, such as the individual from whom the data originates, his/her guardian or representative, a physician or health care worker, genetic counsellor, or insurance agent, for example via a user interface accessible over the internet, together with an interpretation of the genotype data, e.g., in the form of a risk measure (such as an absolute risk (AR), risk ratio (RR) or odds ratio (OR)) for the disease. In another embodiment, at-risk markers identified in a genotype dataset derived from an individual are assessed and results from the assessment of the risk conferred by the presence of such at-risk variants in the dataset are made available to the third party, for example via a secure web interface, or by other communication means. The results of such risk assessment can be reported in numeric form (e.g., by risk values, such as absolute risk, relative risk, and/or an odds ratio, or by a percentage increase in risk compared with a reference), by graphical means, or by other means suitable to illustrate the risk to the individual from whom the genotype data is derived.

### Nucleic Acids and Polypeptides

[0272] The nucleic acids and polypeptides described herein can be used in methods and kits of the present invention. An “isolated” nucleic acid molecule, as used herein, is one that is separated from nucleic acids that normally flank the gene or nucleotide sequence (as in genomic sequences) and/or has been completely or partially purified from other transcribed sequences (e.g., as in an RNA library). For example, an isolated nucleic acid of the invention can be substantially isolated with respect to the complex cellular milieu in which it naturally occurs, or culture medium when produced by recombinant techniques, or chemical precursors or other chemicals when chemically synthesized. In some instances, the isolated material will form part of a composition (for example, a crude extract containing other substances), buffer system or reagent mix. In other circumstances, the material can be purified to essential homogeneity, for example as determined by polyacrylamide gel electrophoresis (PAGE) or column chromatography (e.g., HPLC). An isolated nucleic acid molecule of the invention can comprise at least about 50%, at least about 80% or at least about 90% (on a molar basis) of all macromolecular species present. With regard to genomic DNA, the term “isolated” also can refer to nucleic acid molecules that are separated from the chromosome with which the genomic DNA is naturally associated. For example, the isolated nucleic acid molecule can contain less than about 250 kb, 200 kb, 150 kb, 100 kb, 75 kb, 50 kb, 25 kb, 10 kb, 5 kb, 4 kb, 3 kb, 2 kb, 1 kb, 0.5 kb or 0.1 kb of the nucleotides that flank the nucleic acid molecule in the genomic DNA of the cell from which the nucleic acid molecule is derived.

[0273] The nucleic acid molecule can be fused to other coding or regulatory sequences and still be considered isolated. Thus, recombinant DNA contained in a vector is included in the definition of “isolated” as used herein. Also, isolated nucleic acid molecules include recombinant DNA molecules in heterologous host cells or heterologous organisms, as well as partially or substantially purified DNA molecules in solution. “Isolated” nucleic acid molecules also encompass in vivo and in vitro RNA transcripts of the DNA molecules of the present invention. An isolated nucleic acid molecule or nucleotide sequence can include a nucleic acid molecule or nucleotide sequence that is synthesized chemically or by recombinant means. Such isolated nucleotide sequences are useful, for example, in the manufacture of the encoded polypeptide, as probes for isolating homologous sequences (e.g., from other mammalian species), for gene mapping (e.g., by in situ hybridization with chromosomes), or for detecting expression of the gene in tissue (e.g., human tissue), such as by Northern blot analysis or other hybridization techniques.

[0274] The invention also pertains to nucleic acid molecules that hybridize under high stringency hybridization conditions, such as for selective hybridization, to a nucleotide sequence described herein (e.g., nucleic acid molecules that specifically hybridize to a nucleotide sequence containing a polymorphic site associated with a marker or haplotype described herein). Such nucleic acid molecules can be detected and/or isolated by allele- or sequence-specific hybridization (e.g., under high stringency conditions). Stringency conditions and methods for nucleic acid hybridizations are well known to the skilled person (see, e.g., Current Protocols in Molecular Biology, Ausubel, F. et al, John Wiley & Sons, (1998), and Kraus, M. and Aaronson, S., Methods Enzymol., 200:546-556 (1991), the entire teachings of which are incorporated by reference herein.

[0275] The percent identity of two nucleotide or amino acid sequences can be determined by aligning the sequences for optimal comparison purposes (e.g., gaps can be introduced in the sequence of a first sequence). The nucleotides or amino acids at corresponding positions are then compared, and the percent identity between the two sequences is a function of the number of identical positions shared by the sequences (i.e., % identity=# of identical positions/total # of positions×100). In certain embodiments, the length of a sequence aligned for comparison purposes is at least 30%, at least 40%, at least 50%, at least 60%, at least 70%, at least 80%, at least 90%, or at least 95%, of the length of the reference sequence. The actual comparison of the two sequences can be accomplished by well-known methods, for example, using a mathematical algorithm. A non-limiting example of such a mathematical algorithm is described in Karlin, S, and Altschul, S., Proc. Natl. Acad. Sci. USA, 90:5873-5877 (1993). Such an algorithm is incorporated into the NBLAST and XBLAST programs (version 2.0), as described in Altschul, S. et al., Nucleic Acids Res., 25:3389-3402 (1997). When utilizing BLAST and Gapped BLAST programs, the default parameters of the respective programs (e.g., NBLAST) can be used. See the website on the world wide web at ncbi.nlm.nih.gov. In one embodiment, parameters for sequence comparison can be set at score=100, wordlength=12, or can be varied (e.g., W=5 or W=20). Another example of an algorithm is BLAT (Kent, W. J. Genome Res. 12:656-64 (2002)).

[0276] Other examples include the algorithm of Myers and Miller, CABIOS (1989), ADVANCE and ADAM as described in Torellis, A. and Robotti, C., Comput. Appl. Biosci. 10:3-5 (1994); and FASTA described in Pearson, W. and Lipman, D., Proc. Natl. Acad. Sci. USA, 85:2444-48 (1988).

[0277] In another embodiment, the percent identity between two amino acid sequences can be accomplished using the GAP program in the GCG software package (Accelrys, Cambridge, UK).

[0278] The present invention also provides isolated nucleic acid molecules that contain a fragment or portion that hybridizes under highly stringent conditions to a nucleic acid that comprises, or consists of, the nucleotide sequence of any one of LD Block C19, LD Block C03, LD Block C08A, and LD Block C08B, or a nucleotide sequence comprising, or consisting of, the complement of the nucleotide sequence of any one of LD Block C19, LD Block C03, LD Block C08A and LD Block C08B, wherein the nucleotide sequence comprises at least one polymorphic allele contained in the markers and haplotypes described herein. The nucleic acid fragments of the invention are at least about 15, at least about 18, 20, 23 or 25 nucleotides, and can be 30, 40, 50, 100, 200, 500, 1000, 10,000 or more nucleotides in length. In certain embodiments, the nucleic acid fragments are from about 15 to about 1000 nucleotides in length. In certain other embodiments, the nucleic acid fragments are from about 18 to about 100 nucleotides in length, from about 12 to about 50 nucleotides in length, from about 12 to about 40 nucleotides in length, or from about 12 to about 30 nucleotides in length.

[0279] The present invention further provides isolated nucleic acid molecules that contain a fragment or portion that hybridizes under highly stringent conditions to a nucleic acid that comprises, or consists of, the nucleotide sequence of any one of SEQ ID NO: 1-978, as described herein. The nucleic acid fragments can be from 10-600 nucleotides in length, such as from 10-500 nucleotides, 12-200 nucleotides, 12-100 nucleotides, 12-50 nucleotides and 12-30 nucleotides in length.

[0280] The nucleic acid fragments of the invention are used as probes or primers in assays such as those described herein. “Probes” or “primers” are oligonucleotides that hybridize in a base-specific manner to a complementary strand of a nucleic acid molecule. In addition to DNA and RNA, such probes and primers include polypeptide nucleic acids (PNA), as described in Nielsen, P. et al., Science 254:1497-1500 (1991). A probe or primer comprises a region of nucleotide sequence that hybridizes to at least about 15, typically about 20-25, and in certain embodiments about 40, 50 or 75, consecutive nucleotides of a nucleic acid molecule. In one embodiment, the probe or primer comprises at least one allele of at least one polymorphic marker or at least one haplotype described herein, or the complement thereof. In particular embodiments, a probe or primer can comprise 100 or fewer nucleotides; for example, in certain embodiments from 6 to 50 nucleotides, or, for example, from 12 to 30 nucleotides. In other embodiments, the probe or primer is at least 70% identical, at least 80% identical, at least 85% identical, at least 90% identical, or at least 95% identical, to the contiguous nucleotide sequence or to the complement of the contiguous nucleotide sequence. In another embodiment, the probe or primer is capable of selectively hybridizing to the contiguous nucleotide sequence or to the complement of the contiguous nucleotide sequence. Often, the probe or primer further comprises a label, e.g., a radioisotope, a fluorescent label, an enzyme label, an enzyme co-factor label, a magnetic label, a spin label, an epitope label.

[0281] The nucleic acid molecules of the invention, such as those described above, can be identified and isolated using standard molecular biology techniques well known to the skilled person. The amplified DNA can be labeled (e.g., radiolabeled, fluorescently labeled) and used as a probe for screening a cDNA library derived from human cells. The cDNA can be derived from mRNA and contained in a suitable vector. Corresponding clones can be isolated, DNA obtained following in vivo excision, and the cloned insert can be sequenced in either or both orientations by art-recognized methods to identify the correct reading frame encoding a polypeptide of the appropriate molecular weight. Using these or similar methods, the polypeptide and the DNA encoding the polypeptide can be isolated, sequenced and further characterized.

### Antibodies

[0282] The invention also provides antibodies which bind to an epitope comprising either a variant amino acid sequence (e.g., comprising an amino acid substitution) encoded by a variant allele or the reference amino acid sequence encoded by the corresponding non-variant or wild-type allele. The term “antibody” as used herein refers to immunoglobulin molecules and immunologically active portions of immunoglobulin molecules, i.e., molecules that contain antigen-binding sites that specifically bind an antigen. A molecule that specifically binds to a polypeptide of the invention is a molecule that binds to that polypeptide or a fragment thereof, but does not substantially bind other molecules in a sample, e.g., a biological sample, which naturally contains the polypeptide. Examples of immunologically active portions of immunoglobulin molecules include F(ab) and F(ab′)₂ fragments which can be generated by treating the antibody with an enzyme such as pepsin. The invention provides polyclonal and monoclonal antibodies that bind to a polypeptide of the invention. The term “monoclonal antibody” or “monoclonal antibody composition”, as used herein, refers to a population of antibody molecules that contain only one species of an antigen binding site capable of immunoreacting with a particular epitope of a polypeptide of the invention. A monoclonal antibody composition thus typically displays a single binding affinity for a particular polypeptide of the invention with which it immunoreacts.

[0283] Polyclonal antibodies can be prepared as described above by immunizing a suitable subject with a desired immunogen, e.g., polypeptide of the invention or a fragment thereof. The antibody titer in the immunized subject can be monitored over time by standard techniques, such as with an enzyme linked immunosorbent assay (ELISA) using immobilized polypeptide. If desired, the antibody molecules directed against the polypeptide can be isolated from the mammal (e.g., from the blood) and further purified by well-known techniques, such as protein A chromatography to obtain the IgG fraction. At an appropriate time after immunization, e.g., when the antibody titers are highest, antibody-producing cells can be obtained from the subject and used to prepare monoclonal antibodies by standard techniques, such as the hybridoma technique originally described by Kohler and Milstein, Nature 256:495-497 (1975), the human B cell hybridoma technique (Kozbor et al., Immunol. Today 4: 72 (1983)), the EBV-hybridoma technique (Cole et al., Monoclonal Antibodies and Cancer Therapy, Alan R. Liss, 1985, Inc., pp. 77-96) or trioma techniques. The technology for producing hybridomas is well known (see generally Current Protocols in Immunology (1994) Coligan et al., (eds.) John Wiley & Sons, Inc., New York, N.Y.). Briefly, an immortal cell line (typically a myeloma) is fused to lymphocytes (typically splenocytes) from a mammal immunized with an immunogen as described above, and the culture supernatants of the resulting hybridoma cells are screened to identify a hybridoma producing a monoclonal antibody that binds a polypeptide of the invention.

[0284] Any of the many well known protocols used for fusing lymphocytes and immortalized cell lines can be applied for the purpose of generating a monoclonal antibody to a polypeptide of the invention (see, e.g., Current Protocols in Immunology, supra; Galfre et al., Nature 266:55052 (1977); R. N. Kenneth, in Monoclonal Antibodies: A New Dimension In Biological Analyses, Plenum Publishing Corp., New York, N.Y. (1980); and Lerner, Yale J. Biol. Med. 54:387-402 (1981)). Moreover, the ordinarily skilled worker will appreciate that there are many variations of such methods that also would be useful.

[0285] Alternative to preparing monoclonal antibody-secreting hybridomas, a monoclonal antibody to a polypeptide of the invention can be identified and isolated by screening a recombinant combinatorial immunoglobulin library (e.g., an antibody phage display library) with the polypeptide to thereby isolate immunoglobulin library members that bind the polypeptide. Kits for generating and screening phage display libraries are commercially available (e.g., the Pharmacia Recombinant Phage Antibody System, Catalog No. 27-9400-01; and the Stratagene SurtZAP™ Phage Display Kit, Catalog No. 240612). Additionally, examples of methods and reagents particularly amenable for use in generating and screening antibody display library can be found in, for example, U.S. Pat. No. 5,223,409; PCT Publication No. WO 92/18619; PCT Publication No. WO 91/17271; PCT Publication No. WO 92/20791; PCT Publication No. WO 92/15679; PCT Publication No. WO 93/01288; PCT Publication No. WO 92/01047; PCT Publication No. WO 92/09690; PCT Publication No. WO 90/02809; Fuchs et al., Bio/Technology 9: 1370-1372 (1991); Hay et al., Hum. Antibod. Hybridomas 3:81-85 (1992); Huse et al., Science 246: 1275-1281 (1989); and Griffiths et al., EMBO J. 12:725-734 (1993).

[0286] Additionally, recombinant antibodies, such as chimeric and humanized monoclonal antibodies, comprising both human and non-human portions, which can be made using standard recombinant DNA techniques, are within the scope of the invention. Such chimeric and humanized monoclonal antibodies can be produced by recombinant DNA techniques known in the art.

[0287] In general, antibodies of the invention (e.g., a monoclonal antibody) can be used to isolate a polypeptide of the invention by standard techniques, such as affinity chromatography or immunoprecipitation. A polypeptide-specific antibody can facilitate the purification of natural polypeptide from cells and of recombinantly produced polypeptide expressed in host cells. Moreover, an antibody specific for a polypeptide of the invention can be used to detect the polypeptide (e.g., in a cellular lysate, cell supernatant, or tissue sample) in order to evaluate the abundance and pattern of expression of the polypeptide. Antibodies can be used diagnostically to monitor protein levels in tissue as part of a clinical testing procedure, e.g., to, for example, determine the efficacy of a given treatment regimen. The antibody can be coupled to a detectable substance to facilitate its detection. Examples of detectable substances include various enzymes, prosthetic groups, fluorescent materials, luminescent materials, bioluminescent materials, and radioactive materials. Examples of suitable enzymes include horseradish peroxidase, alkaline phosphatase, beta-galactosidase, or acetylcholinesterase; examples of suitable prosthetic group complexes include streptavidin/biotin and avidin/biotin; examples of suitable fluorescent materials include umbelliferone, fluorescein, fluorescein isothiocyanate, rhodamine, dichlorotriazinylamine fluorescein, dansyl chloride or phycoerythrin; an example of a luminescent material includes luminol; examples of bioluminescent materials include luciferase, luciferin, and aequorin, and examples of suitable radioactive material include ¹²⁵I, ¹³¹I, ³⁵S or ³H.

[0288] Antibodies may also be useful in pharmacogenomic analysis. In such embodiments, antibodies against variant proteins encoded by nucleic acids according to the invention, such as variant proteins that are encoded by nucleic acids that contain at least one polymorpic marker of the invention, can be used to identify individuals that require modified treatment modalities.

[0289] Antibodies can furthermore be useful for assessing expression of variant proteins in disease states, such as in active stages of a disease, or in an individual with a predisposition to a disease related to the function of the protein, in particular prostate cancer. Antibodies specific for a variant protein of the present invention that is encoded by a nucleic acid that comprises at least one polymorphic marker or haplotype as described herein can be used to screen for the presence of the variant protein, for example to screen for a predisposition to prostate cancer as indicated by the presence of the variant protein.

[0290] Antibodies can be used in other methods. Thus, antibodies are useful as diagnostic tools for evaluating proteins, such as variant proteins of the invention, in conjunction with analysis by electrophoretic mobility, isoelectric point, tryptic or other protease digest, or for use in other physical assays known to those skilled in the art. Antibodies may also be used in tissue typing. In one such embodiment, a specific variant protein has been correlated with expression in a specific tissue type, and antibodies specific for the variant protein can then be used to identify the specific tissue type.

[0291] Subcellular localization of proteins, including variant proteins, can also be determined using antibodies, and can be applied to assess aberrant subcellular localization of the protein in cells in various tissues. Such use can be applied in genetic testing, but also in monitoring a particular treatment modality. In the case where treatment is aimed at correcting the expression level or presence of the variant protein or aberrant tissue distribution or developmental expression of the variant protein, antibodies specific for the variant protein or fragments thereof can be used to monitor therapeutic efficacy.

[0292] Antibodies are further useful for inhibiting variant protein function, for example by blocking the binding of a variant protein to a binding molecule or partner. Such uses can also be applied in a therapeutic context in which treatment involves inhibiting a variant protein's function. An antibody can be for example be used to block or competitively inhibit binding, thereby modulating (i.e., agonizing or antagonizing) the activity of the protein. Antibodies can be prepared against specific protein fragments containing sites required for specific function or against an intact protein that is associated with a cell or cell membrane. For administration in vivo, an antibody may be linked with an additional therapeutic payload, such as radionuclide, an enzyme, an immunogenic epitope, or a cytotoxic agent, including bacterial toxins (diphtheria or plant toxins, such as ricin). The in vivo half-life of an antibody or a fragment thereof may be increased by pegylation through conjugation to polyethylene glycol.

[0293] The present invention further relates to kits for using antibodies in the methods described herein. This includes, but is not limited to, kits for detecting the presence of a variant protein in a test sample. One preferred embodiment comprises antibodies such as a labelled or labelable antibody and a compound or agent for detecting variant proteins in a biological sample, means for determining the amount or the presence and/or absence of variant protein in the sample, and means for comparing the amount of variant protein in the sample with a standard, as well as instructions for use of the kit.

[0294] The present invention will now be exemplified by the following non-limiting example.

### Example 1

[0295] We and others have previously presented results from genome-wide association studies (GWAS) on prostate cancer reporting several common variants conferring risk of the disease (Gudmundsson, J. et al. Nat Genet 39, 631-7 (2007), Haiman, C. A. et al. Nat Genet 39, 638-44 (2007), Gudmundsson, J. et al. Nat Genet 39, 977-83 (2007), Eeles, R. A. et al. Nat Genet 40, 316-21 (2008), Thomas, G. et al. Nat Genet 40, 310-5 (2008), Gudmundsson, J. et al. Nat Genet 40, 281-3 (2008) and Yeager, M. et al. Nat Genet 39, 645-9 (2007)). By scrutinizing our Icelandic GWAS data, analyzing in-house follow-up and public data, as well as through fine-mapping work of previously published loci on 8q24.21, we identified four new variants conferring risk of prostate cancer.

[0296] The four new variants are: allele A of rs10934853 (rs10934853-A) located on 3q21.3, allele G of rs16902094 (rs16902094-G) on 8q24.21, allele T of rs445114 (rs445114-T) also on 8q24.21, and allele C of rs8102476 (rs8102476-C) located on 19q13.2. All SNPs, except rs16902094, are on the Illumina Hap317 chip used in the Icelandic GWAS. rs16902094 was discovered through Solexa re-sequencing of a 527 kb candidate region on 8q24 in pools of Icelandic cases and controls (see Methods). The allele specific odds ratios (ORs) of the four variants range between 1.09 and 1.28 in the Icelandic study group (P 6.4×10⁻³; Table 1). We proceeded to genotype all four SNPs in at least two out of five prostate cancer study groups (deCODE follow up groups) of European descent. These groups come from The Netherlands, Spain, Finland and the United States (US). When results were combined for SNPs successfully genotyped in these groups, they were significant for all loci, having an OR ranging from 1.07 to 1.20 (P<0.005). Combination of the Icelandic GWAS results and the data from the deCODE follow-up groups results in a genome wide significant association signals for rs16902094-G on 8q24 and rs8102476-C on 19q13.2 with an OR of 1.22 and 1.13, respectively (P<10⁻⁷), whereas rs10934853-A on 3q21.3 and rs445114-T on 8q24 have ORs of 1.10 and 1.17, not reaching genome-wide significance (P>10⁻⁷).

[0297] We tested if these association signals could be further confirmed by data released by the Cancer Genetics Markers of Susceptibility (CGEMS) study (Thomas, G. et al. Nat Genet 40, 310-5 (2008), Yeager, M. et al. Nat Genet 39, 645-9 (2007)) for five study groups (see Table 1) and in a paper by Duggan et al. (Duggan, D. et al. J Natl Cancer Inst 99, 1836-44 (2007)). Summary data were downloaded from the CGEMS web site for rs8102476 on 19q13.2, rs445114 on 8q24 and the SNPs rs4857841 on 3q21.3 and rs16902104 on 8q24, that are highly correlated with rs10934853 on 3q21.3 and rs16902094 on 8q24, discussed above (D′≧0.98 and r²≧0.96 according to CEU HapMap and/or Icelandic data). Duggan et al. published data for rs10934853 on 3q21.3 from a study on aggressive prostate cancer in the CAPS study population from Sweden (Duggan, D. et al. J Natl Cancer Inst 99, 1836-44 (2007)). When the public data were combined with the data discussed above, the results for rs10934853-A on 3q21.3 and rs445114-T on 8q24 became genome-wide significant, with an OR of 1.12 and 1.14, respectively (P) 4.7×10⁻¹°, and the results for rs8102476-C on 19q13.2 and rs16902094-G on 8q24 became even more significant, giving an OR of 1.12 and 1.21, respectively (P≦1.6×10⁻¹¹; Table 1). When inspected, a test of heterogeneity in the OR for all variants and all study groups showed a nominally significant heterogeneity (P=0.039) for the 3q21.3 locus, no significant difference was observed for the other three loci (P>0.1).

[0298] The two SNPs on 8q24, rs16902094 and rs445114, are located within the same linkage disequilibrium (LD) region but the correlation between them is very low (D′=1 and r²=0.07 according to Icelandic data) and the results for both remain significant after being adjusted for the other (Table 2). Of the previously published cancer variants on 8q24, only the breast cancer variant (rs13281615; Easton, D. F. et al. Nature 447, 1087-93 (2007)) is located within the same LD-region as the two new 8q24 SNPs and rs445114 is somewhat correlated with it (D′=0.76, r²=0.44; Table 3). However, both rs16902094 and rs445114 show very little correlation with any of the previously published prostate-(Gudmundsson, J. et al. Nat Genet 39, 631-7 (2007), Yeager, M. et al. Nat Genet 39, 645-9 (2007) and Amundadottir, L. T. et al. Nat Genet 38, 652-8 (2006)), colon-(Tomlinson, I. et al. Nat Genet 39, 984-8 (2007), Zanke, B. W. et al. Nat Genet 39, 989-94 (2007) and Heiman, C. A. et al. Nat Genet 39, 954-6 (2007)), or bladder cancer (Kiemeney, L. A. et al. Nat Genet 40, 1307-12 (2008)) risk variants on 8q24 (D′ ≦0.6 and r² ≦0.13; Table 3 and FIG. 2). The results in Iceland for rs16902094, rs445114 and the three previously published prostate cancer risk variants on 8q24, remain significant after being adjusted for each other (Table 4). Hence, rs16902094 and rs445114 can be added to the list of independent prostate cancer risk variants located on 8q24.

[0299] By computing the genotype specific ORs and inspecting the public data we found that the multiplicative model provides an adequate fit for all four loci in the study groups analyzed (Table 5).

[0300] The SNP rs10934853-A on 3q21.3 is located in the fourth intron of the EEFSEC gene, which is an elongation factor required for effective selenoprotein translation. Other RefSeq genes in the same LD region are SEC61A1 and RUVBL1. None of these genes has previously been directly implicated in prostate cancer. On 19q13.2, the SNP is located in a 178 kb LD-region with several annotated RefSeq genes. The closest one is PPP1R14A, a gene reported to be an inhibitor of smooth muscle myosin phosphatase. Similarly, the underlying biological perturbation on 8q24 has not yet been explained.

[0301] The four new loci reported here, add to the rapidly increasing number of prostate cancer susceptibility variants, identified through GWAS. In Table 6, we provide results from the Icelandic population for risk variants that are either widely considered or recently reported to confer risk of prostate cancer. The previously unpublished results from Iceland add support for susceptibility variants at several of these loci (Table 6). In a multi-variant analysis, using the multiplicative model for 22 risk variants, we combined the effect of all variants with an increased risk in the Icelandic population. Based on this analysis the estimated risk is more than 2.5-fold greater for the top 1.3% of the risk distribution, using the population average risk as a reference (Table 7). For these individuals this corresponds to a lifetime risk of over 25% of being diagnosed with prostate cancer, compared with a population average life time risk of about 10% in Iceland. These risk estimates are largely independent of family history (Eeles, R. A., et al., Nat Genet 40:316-21 (2008); Kote-Jarai, Z., et al., Cancer Epidemiol biomarkers Prev 17:2052-61 (2008)). Hence, the estimated risk for an individual can be increased further if history of prostate cancer is known among close relatives.

### Methods

[0302] Icelandic study population. Men diagnosed with prostate cancer were identified based on a nationwide list from the Icelandic Cancer Registry (ICR) (see URL below) that contained all 4,457 Icelandic prostate cancer patients diagnosed from Jan. 1, 1955, to Dec. 31, 2007. The Icelandic prostate cancer sample collection included 1,980 patients (diagnosed from December 1974 to December 2007) who were recruited from November 2000 until June 2008 out of the 2,283 affected individuals who were alive during the study period (a participation rate of about 86%). A total of 1,968 patients were included in the study with genotypes from a genome wide SNP genotyping effort, using the Infinium II assay method and the Sentrix HumanHap300 BeadChip (Illumina, San Diego, Calif., USA) and a Centaurus single track SNP genotyping assay (see Supplementary methods). The mean age at diagnosis for the consenting patients was 71 years (median 71 years) and the range was from 40 to 96 years, while the mean age at diagnosis was 73 years for all prostate cancer patients in the ICR. The median time from diagnosis to blood sampling was 2 years (range 0 to 26 years). In the present study, for all populations, aggressive prostate cancer is defined as: Gleason and/or T3 or higher and/or node positive and/or metastatic disease, while the less aggressive disease is defined as Gleason <7 and T2 or lower. The 35,470 controls (15,359 males (43.3%) and 20,111 females (56.7%)) used in this study consisted of individuals belonging to different genetic research projects at deCODE. The individuals have been diagnosed with common diseases of the cardio-vascular system (e.g. stroke or myocardial infraction), psychiatric and neurological diseases (e.g. schizophrenia, bipolar disorder), endocrine and autoimmune system (e.g. type 2 diabetes, asthma), malignant diseases (e.g. cancer of the breast, kidney, lung, thyroid or melanoma) as well as individuals randomly selected from the Icelandic genealogical database. No single disease project represented more than 6% of the total number of controls. The controls had a mean age of 84 years and the range was from 8 to 105 years. A linear regression analysis showed no correlation between allele frequency of SNPs discussed in the main text and year of birth among the Icelandic controls (P>0.1). The controls were absent from the nationwide list of prostate cancer patients according to the ICR. The DNA for both the Icelandic cases and controls was isolated from whole blood using standard methods.

[0303] The study was approved by the Data Protection Commission of Iceland and the National Bioethics Committee of Iceland. Written informed consent was obtained from all patients, relatives and controls. Personal identifiers associated with medical information and blood samples were encrypted with a third-party encryption system as previously described¹⁶.

### The Netherlands

[0304] The total number of Dutch prostate cancer cases used in this study was 1,100. The Dutch study population was comprised of two recruitment-sets of prostate cancer cases; Group-A was comprised of 390 hospital-based cases recruited from January 1999 to June 2006 at the Urology Outpatient Clinic of the Radboud University Nijmegen Medical Centre (RUNMC); Group-B consisted of 710 cases recruited from June 2006 to December 2006 through a population-based cancer registry held by the Comprehensive Cancer Centre IKO. Both groups were of self-reported European descent. The average age at diagnosis for patients in Group-A was 63 years (median 63 years) and the range was from 43 to 83 years. The average age at diagnosis for patients in Group-B was 65 years (median 66 years) and the range was from 43 to 75 years. The 2,021 control individuals (1,004 males and 1,017 females) were cancer free and were matched for age with the cases. They were recruited within a project entitled “The Nijmegen Biomedical Study”, in the Netherlands. This is a population-based survey conducted by the Department of Epidemiology and Biostatistics and the Department of Clinical Chemistry of the RUNMC, in which 9,371 individuals participated from a total of 22,500 age and sex stratified, randomly selected inhabitants of Nijmegen. Control individuals from the Nijmegen Biomedical Study were invited to participate in a study on gene-environment interactions in multifactorial diseases, such as cancer. All the 2,021 participants in the present study are of self-reported European descent and were fully informed about the goals and the procedures of the study. The study protocol was approved by the Institutional Review Board of Radboud University and all study subjects gave written informed consent.

### Spain

[0305] The Spanish study population used in this study consisted of 820 prostate cancer cases. The cases were recruited from the Oncology Department of Zaragoza Hospital in Zaragoza, Spain, from June 2005 to September 2007. All patients were of self-reported European descent. Clinical information including age at onset, grade and stage was obtained from medical records. The average age at diagnosis for the patients was 69 years (median 70 years) and the range was from 44 to 83 years. The 1,605 Spanish control individuals (737 males and 868 females) were approached at the University Hospital in Zaragoza, Spain, and the males were confirmed to be prostate cancer free before they were included in the study. Study protocols were approved by the Institutional Review Board of Zaragoza University Hospital. All subjects gave written informed consent.

### Chicago

[0306] The Chicago study population used consisted of 1,095 prostate cancer cases. The cases were recruited from the Pathology Core of Northwestern University's Prostate Cancer Specialized Program of Research Excellence (SPORE) from May 2002 to May 2007. The average age at diagnosis for the patients was 60 years (median 59 years) and the range was from 39 to 87 years. The 1,172 European American controls (781 males and 391 females) were recruited as healthy control subjects for genetic studies at the University of Chicago and Northwestern University Medical School, Chicago, US. All individuals from Chicago included in this report were of self-reported European descent. Study protocols were approved by the Institutional Review Boards of Northwestern University and the University of Chicago. All subjects gave written informed consent.

### Nashville

[0307] Study subjects were Americans of Northern European descent, ascertained with informed consent between 2002 and 2009 from Vanderbilt University Medical Center and from the VA Tennessee Valley Healthcare System (adjacent hospitals) with institutional review board oversight. Familial prostate cancer cases were ascertained at the time of treatment for the principal diagnosis of prostate cancer, and controls were ascertained at the time of routine preventative screening for prostate cancer. All prostate cancer probands included in the study were from pedigrees with a family history of prostate cancer (≧2 affected), and all control probands were from pedigrees without a family history of prostate cancer. Family history included 1st and 2nd degree relatives. Controls had a screening prostate specific antigen (PSA) test <4 ng/ml at the time of ascertainment, had no personal history of prostate cancer, no record of a PSA test ≧4 ng/ml, and no record of abnormal digital rectal examination. The study included 683 unrelated, independent familial prostate cancer probands and 742 unrelated, independent control probands. Gleason score and tumor stage from surgical pathology was available for 96% of cases. The average age of diagnosis for cases was 60.3 years, and the average age at ascertainment screen for controls was 63.0 years.

### Finland

[0308] Samples (2,439) were recruited in Tampere and are all of Finnish origin. The mean age at diagnosis for these unselected consecutive prostate cancer patients was 68.7 years (range 43.1-94.9). The patients were diagnosed with the disease between 1993 and 2008 in the Tampere University Hospital, Department of Urology. Tampere University Hospital is a regional referral center in the area for all patients with prostate cancer, which results in an unselected, population-based collection of patients. The remainder of the cases, 248 men with family history of the disease not known to be related to each other, were recruited from all of Finland. Their mean age at diagnosis was 65.6 years (range 44-86.8). Study protocols were approved by the Ethics Committee of the Tampere University Hospital and the Ministry of Social Affairs and Health in Finland. All subjects gave written informed consent. For controls, 902 male samples and 903 female samples were used. Both of these Finnish population control groups consisted of DNA samples from anonymous, voluntary and healthy blood donors obtained from the Blood Center of the Finnish Red Cross in Tampere.

### Genotyping

[0309] Illumina genotyping. 1,968 and 35,382 Icelandic case- and control-samples respectively, were successfully assayed with the Infinium HumanHap300 SNP chip (Illumina, SanDiego, Calif., USA), containing 317,503 haplotype tagging SNPs derived from phase I of the International HapMap project. Of the SNPs assayed on the chip, 2,906 SNPs had a yield lower than 95%, 271 SNPs had a minor allele frequency, in the combined set of cases and controls, below 0.01 or were monomorphic. An additional 4,632 SNPs showed a significant distortion from Hardy-Weinberg equilibrium in the controls (P<1.0×10⁻³). In total, 6,983 unique SNPs were removed from the study. Thus, the analysis reported in the main text utilizes 310,520 SNPs. Any samples with a call rate below 98% were excluded from the analysis.

[0310] Replication genotyping. Single SNP genotyping of the SNPs reported in the main text for the four case-control groups from Iceland, The Netherlands, Spain and Chicago was carried out by deCODE genetics in Reykjavik, Iceland, applying the Centaurus (Nanogen) platform (Kutyavin, I. V. et al. Nucleic Acids Research 34, e128 (2006)). The quality of each Centaurus SNP assay was evaluated by genotyping each assay in the CEU and/or YRI HapMap samples and comparing the results with the HapMap publicly released data. Assays with >1.5% mismatch rate were not used and a linkage disequilibrium (LD) test was used for markers known to be in LD. We re-genotyped more than 10% of the samples and observed a mismatch rate lower than 0.5%. Genotyping of samples from Finland and Nashville was done using the same Centaurus assays as used in Iceland at the University of Tampere and Vanderbilt University, respectively, using standard protocols.

[0311] For each of the SNPs discussed in the main text, the yield was higher than 95% for those samples which genotyping was attempted for in every study group.

[0312] The SNP rs16902094 on 8q24 is not present on the Human Hap300 chip. Therefore, using a single SNP assay for genotyping, an attempt was made to genotype 6,900 and 800 individuals, respectively, of the 35,382 Icelandic controls as well as 1,860 Icelandic cases and all available individuals from the replication study groups.

[0313] Discovery of new SNP on 8q24 by Solexa re-sequencing. In order to search for new SNPs on 8q24, a 527 kb region (128113108-128640337 bp, Build 36) was sequenced using the Solexa re-sequencing platform (Illumina Inc.). From our set of about 2,000 cases; 800 were selected randomly and split into two DNA-pools, each with 400 samples. Similarly, 800 control individuals, not known to have prostate cancer, were randomly selected and split into two DNA-pools. Dilutions were prepared in duplicates and used for long-range PCR reactions (each amplimer consising of about 10 kb). PCR fragments were run on 0.8% agarose gels and the DNA visualized with BlueView (Sigma Inc.) and their sizes estimated with Hind III size marker (Fermentas Inc). Bands of correct sizes were excised out of the gels and purified with Qiagen gel extraction kit (Qiagen Inc.). The PCR products were quantified by picogreen assay (Invitrogen Inc.) as described by the manufacturer. The preparation of the Solexa DNA libraries, the cluster generation and DNA sequencing was done as described by Bentley et al (Bentley, D. R. et al. Nature 456, 53-9 (2008)). The SNP analysis pipeline is composed of four components: Alignment, SNP calling, Filtering and Association analysis. Promising SNPs were selected for further study/confirmation using Centaurus single track SNP assays.

### Statistical Analysis

[0314] Association analysis. For SNPs that were in strong LD, whenever the genotype of one SNP was missing for an individual, the genotype of the correlated SNP was used to provide partial information through a likelihood approach as previously described (Amundadottir, L. T. et al. Nat Genet 38, 652-8 (2006)). A likelihood procedure described in a previous publication Gretarsdottir, S. et al. Nat Genet 35, 131-8 (2003)) and implemented in the NEMO software was used for the association analyses.

[0315] We tested the association of an allele to prostate cancer using a standard likelihood ratio statistic that, if the subjects were unrelated, would have asymptotically a χ² distribution with one degree of freedom under the null hypothesis. Allelic frequencies rather than carrier frequencies are presented for the markers in the main text. Allele-specific ORs and associated P values were calculated assuming a multiplicative model for the two chromosomes of an individual (Falk, C. T. Rubinstein, P. Ann Hum Genet 51 (Pt 3), 227-33 (1987)). Results from multiple case-control groups were combined using a Mantel-Haenszel model (Mantel, N. & Haenszel, W. J Natl Cancer Inst. 22, 719-48 (1959)) in which the groups were allowed to have different population frequencies for alleles, haplotypes and genotypes but were assumed to have common relative risks (see Gudmundsson, J. et al. Nat Genet 39, 977-83 (2007) for a more detailed description of the association analysis).

[0316] The control groups from Iceland, The Netherlands, Spain, and Finland include both male and female controls. No significant difference between male and female controls was detected for SNPs presented in Table 1 for each of these four groups. Controls from other study groups include only males.

[0317] In order to for association for the SNP rs4962416 on 10q26, which is in the CEU section of the Hapmap database but absent from the Illumine Hap300 chip, we use a method based on haplotypes of two markers (rs7077275 and rs893856) present on the chip. We used a method we have previously employed, (Styrkarsdottir, U. et al. N Engl J Med 358, 2355-65 (2008)) that is an extension of the two-marker haplotype tagging method (Pe'er, I. et al. Nat Genet 38, 663-7 (2006)) and is similar in spirit to two other proposed methods (Nicolae, D. L. Genet Epidemiol 30, 718-27 (2006), Zaitlen, N., et al. Am J Hum Genet 80, 683-91 (2007)). We computed associations with a linear combination of the different haplotypes chosen to act as surrogates to HapMap markers in the regions. These calculations were based on 1,724 prostate cancer cases and 35,322 controls genotyped on chip.

[0318] Analysis of the CGEMS data. For the five individual study populations from the CGEMS study (Yeager, M. et al. Nat Genet 39, 645-9 (2007), Thomas, G. et al. Nat Genet 40, 310-5 (2008)) (ACS, ATBC, FPCC, HPFS, PLCO), when assessing the allelic effect we used the pre-computed data (released in spring, 2008) corresponding to “All case versus control (dichotomous), genotype trend effect model, adjusted”. When assessing the genotypic effect at each loci for the CGEMS study we used the pre-computed “All case versus control (dichotomous), genotype-specific effect model, adjusted, ALL (ACS, HPFS, FPCC, ATBC, PLCO)”.

[0319] Correction for relatedness. Some individuals in the Icelandic case-control groups were related to each other, causing the aforementioned χ² test statistic to have a mean >1. We estimated the inflation factor by using a previously described procedure (Stefansson, H. et al. Nat Genet 37, 129-37 (2005)) in which we simulated genotypes through the genealogy of the 37,350 Icelanders analyzed in the present study (number of simulations=100,000). The inflation factor was estimated to be 1.10. Results from the Icelandic samples presented in the main text are based on adjusting the X² statistics by dividing each of them by 1.10.

TABLE 1
Summary association results for the SNPs on 3q21.3, 8q24 and 19q13.2.

| Study | Cases | Controls | Frequency | | | |
|---|---|---|---|---|---|---|
| population | (N) | (N) | Cases | Controls | OR (95% CI) | P-value |

A. Results for rs10934853 [A] or rs4857841 [A] on 3q21.3

| | | | | | | |
|---|---|---|---|---|---|---|
| Iceland^{a} | 1,968 | 35,227 | 0.295 | 0.269 | 1.14 (1.06, 1.22) | 3.2E−04 |
| Chicago, Illinois | 1,077 | 1,003 | 0.313 | 0.273 | 1.21 (1.06, 1.39) | 4.4E−03 |
| Finland | 2,638 | 1,716 | 0.330 | 0.319 | 1.05 (0.96, 1.15) | 0.27 |
| The Netherlands | 1,084 | 1,827 | 0.306 | 0.286 | 1.10 (0.98, 1.24) | 0.10 |
| Nashville, | 596 | 687 | 0.283 | 0.270 | 1.07 (0.90, 1.27) | 0.47 |
| Tennessee | | | | | | |
| Spain | 811 | 1,605 | 0.306 | 0.314 | 0.96 (0.84, 1.09) | 0.54 |
| ACS^{b} | 1,758 | 1,775 | 0.300 | 0.258 | 1.25 (1.12, 1.39) | 4.3E−05 |
| ATBC^{b} | 928 | 921 | 0.309 | 0.319 | 0.96 (0.84, 1.10) | 0.59 |
| FPCC^{b} | 654 | 657 | 0.291 | 0.272 | 1.09 (0.92, 1.29) | 0.34 |
| HPFS^{b} | 595 | 609 | 0.313 | 0.278 | 1.18 (0.99, 1.40) | 0.070 |
| PLCO^{b} | 1,167 | 1,093 | 0.308 | 0.266 | 1.23 (1.08, 1.41) | 2.5E−03 |
| CAPS^{c} | 498 | 494 | 0.329 | 0.288 | 1.21 (1.00, 1.46) | 0.045 |
| All combined^{d} | 13,774 | 47,614 | — | 0.284 | 1.12 (1.08, 1.16) | 2.9E−10 |

B. Results for rs16902094 [G] or rs16902104 [T] on 8q24

| | | | | | | |
|---|---|---|---|---|---|---|
| Iceland^{a, e} | 1,858 | 6,853 | 0.168 | 0.136 | 1.28 (1.15, 1.41) | 3.5E−06 |
| Chicago, Illinois | 797 | 758 | 0.166 | 0.147 | 1.16 (0.95, 1.41) | 0.14 |
| Finland | 2,197 | 1,725 | 0.248 | 0.222 | 1.15 (1.03, 1.28) | 9.9E−03 |
| The Netherlands | 831 | 837 | 0.161 | 0.138 | 1.20 (0.99, 1.44) | 0.066 |
| Nashville, | 669 | 733 | 0.170 | 0.130 | 1.37 (1.11, 1.69) | 3.0E−03 |
| Tennessee | | | | | | |
| Spain | 643 | 952 | 0.162 | 0.137 | 1.21 (1.00, 1.48) | 0.055 |
| ACS^{b} | 1,759 | 1,774 | 0.156 | 0.132 | 1.22 (1.06, 1.39) | 4.3E−03 |
| ATBC^{b} | 929 | 920 | 0.255 | 0.193 | 1.43 (1.22, 1.67) | 1.0E−05 |
| FPCC^{b} | 656 | 657 | 0.152 | 0.145 | 1.06 (0.85, 1.31) | 0.61 |
| HPFS^{b} | 596 | 611 | 0.127 | 0.133 | 0.93 (0.74, 1.18) | 0.57 |
| PLCO^{b} | 1,167 | 1,093 | 0.145 | 0.137 | 1.09 (0.92, 1.30) | 0.31 |
| All combined^{d} | 12,102 | 16,913 | — | 0.150 | 1.21 (1.15, 1.26) | 6.2E−15 |

C. Results for rs445114 [T] on 8q24

| | | | | | | |
|---|---|---|---|---|---|---|
| Iceland^{a} | 1,727 | 35,382 | 0.710 | 0.672 | 1.20 (1.11, 1.29) | 5.0E−06 |
| The Netherlands | 910 | 1,832 | 0.676 | 0.650 | 1.13 (1.00, 1.27) | 0.048 |
| Spain | 490 | 1,387 | 0.660 | 0.624 | 1.17 (1.01, 1.36) | 0.041 |
| ACS | 1,757 | 1,768 | 0.651 | 0.618 | 1.15 (1.05, 1.27) | 4.0E−03 |
| ATBC | 925 | 919 | 0.702 | 0.661 | 1.22 (1.06, 1.40) | 6.6E−03 |
| FPCC | 655 | 655 | 0.647 | 0.635 | 1.05 (0.90, 1.24) | 0.52 |
| HPFS | 595 | 608 | 0.613 | 0.633 | 0.91 (0.77, 1.07) | 0.26 |
| PLCO | 1,175 | 1,100 | 0.641 | 0.618 | 1.13 (1.00, 1.28) | 5.7E−02 |
| All combined^{d} | 8,234 | 43,651 | — | 0.639 | 1.14 (1.10, 1.19) | 4.7E−10 |

D. Results for rs8102476 [C] on 19q13.2

| | | | | | | |
|---|---|---|---|---|---|---|
| Iceland^{a} | 1,941 | 35,330 | 0.517 | 0.495 | 1.09 (1.03, 1.17) | 6.4E−03 |
| Chicago, Illinois | 1,086 | 1,172 | 0.612 | 0.579 | 1.15 (1.02, 1.29) | 0.024 |
| Finland | 2,629 | 1,739 | 0.481 | 0.435 | 1.21 (1.11, 1.31) | 2.1E−05 |
| The Netherlands | 1,086 | 1,830 | 0.567 | 0.528 | 1.17 (1.05, 1.30) | 4.2E−03 |
| Nashville, Tennessee | 596 | 689 | 0.565 | 0.553 | 1.05 (0.90, 1.23) | 0.55 |
| Spain | 728 | 1,389 | 0.641 | 0.619 | 1.10 (0.96, 1.25) | 0.16 |
| ACS | 1,755 | 1,766 | 0.574 | 0.551 | 1.10 (1.00, 1.21) | 0.043 |
| ATBC | 926 | 919 | 0.473 | 0.461 | 1.05 (0.93, 1.20) | 0.43 |
| FPCC | 656 | 655 | 0.607 | 0.563 | 1.19 (1.02, 1.40) | 0.027 |
| HPFS | 595 | 609 | 0.574 | 0.57 | 1.03 (0.88, 1.21) | 0.74 |
| PLCO | 1,175 | 1,100 | 0.571 | 0.545 | 1.10 (0.98, 1.24) | 0.11 |
| All combined^{d} | 13,173 | 47,198 | — | 0.536 | 1.12 (1.08, 1.15) | 1.6E−11 |

All P values shown are two-sided. Shown are the corresponding numbers of cases and controls (N), allelic frequencies of variants in affected and control individuals, the allelic odds-ratio (OR) with 95% confidence interval (95% CI) and P value.
^{a}Results presented for Iceland were adjusted for relatedness (see Supplementary Methods).
^{b}The results for the five CGEMS groups on 3q21.3 and 8q24 are for the SNPs rs4857841[A] and rs16902104[T], which are highly correlated with rs10934853[A] and rs169020948[G], respectively (D′ and r² > 0.96 according to Icelandic and CEU HapMap data).
^{c}Results for the Swedish CAPS study group are for rs10934853[A] published by Duggan et al.⁸
^{d}For the combined study populations, the reported control frequency was the average, unweighted control frequency of the individual populations, while the OR and the P value were estimated using the Mantel-Haenszel model.
^{e}Results for rs16902104 [T] in Iceland: OR = 1.36; P-value 2.32E−10; based on imputation of 1,776 cases and 35,675 controls.

TABLE 2
Adjusted and unadjusted results for rs445114 and rs16902094 on 8q24.

| | | | rs445114 | | rs16902094 | |
|---|---|---|---|---|---|---|
| | | | Unadjusted | Adjusted | Unadjusted | Adjusted |
| | Cases | Controls | OR | OR | OR | OR |
| Study population | (n) | (n) | (P-value) | (P-value) | (P-value) | (P-value) |
| Iceland | 1607 | 6596 | 1.20 (4E−05) | 1.15 (4E−03) | 1.31 (1E−06) | 1.25 (1E−04) |
| Spain | 442 | 925 | 1.26 (0.007) | 1.21 (0.04) | 1.31 (0.02) | 1.21 (0.10) |
| The Netherlands | 743 | 837 | 1.09 (0.24) | 1.05 (0.52) | 1.23 (0.04) | 1.21 (0.07) |
| All Combined | 2792 | 8358 | 1.18 (1E−06) | 1.13 (8E−04) | 1.29 (8E−09) | 1.24 (5E−06) |

Shown are results for rs445114 before and after being adjusted for rs16902094 as well as results for rs16902094 before and after being adjusted for rs445114. The two SNPs are only correlated to a very small degree (D′ = 1 and r2 = 0.07 based on results from 5450 Icelanders). Results are only presented for individuals and populations where data is available for both SNPs.

TABLE 3
LD-information for rs16902094 and rs445114 on 8q24 and the previously published
cancer risk variants on 8q24.

| Marker-1 | Marker-2 (Comment) | D′ | r2 | Data set |
|---|---|---|---|---|
| rs16902094 | rs1447295 (Region 1 prostate cancer) | 0.03 | 3.2E−04 | deCODE generated CEU data |
| rs16902094 | rs16901979 (Region 2 prostate cancer) | 0.20 | 5.0E−03 | deCODE generated CEU data |
| rs16902094 | rs6983267 (Region 3 prostate- and colon cancer) | 0.14 | 4.8E−03 | deCODE generated CEU data |
| rs16902094 | rs13281615 (Breast cancer) | 0.61 | 0.063 | deCODE generated CEU data |
| rs16902094 | rs9642880 (Bladder cancer) | 0.06 | 5.1E−04 | deCODE generated CEU data |
| rs16902094 | rs13254738 (MEC-prostate cancer) | 0.43 | 0.070 | deCODE generated CEU data |
| rs16902094 | rs6983561 (MEC-prostate cancer) | 0.20 | 5.0E−03 | deCODE generated CEU data |
| rs16902094 | rs7000448 (MEC-prostate cancer) | 0.02 | 3.1E−05 | deCODE generated CEU data |
| rs16902094 | rs10090154 (MEC-prostate cancer) | 0.14 | 2.3E−04 | deCODE generated CEU data |
| rs445114 | rs1447295 (Region 1 prostate cancer) | 0.24 | 2.6E−03 | Public CEU-HapMap data |
| rs445114 | rs16901979 (Region 2 prostate cancer) | 0.27 | 2.8E−03 | Public CEU-HapMap data |
| rs445114 | rs6983267 (Region 3 prostate- and colon cancer) | 0.31 | 0.051 | Public CEU-HapMap data |
| rs445114 | rs13281615 (Breast cancer) | 0.76 | 0.44 | Public CEU-HapMap data |
| rs445114 | rs9642880 (Bladder cancer) | 0.11 | 6.3E−03 | Public CEU-HapMap data |
| rs445114 | rs10090154 (MEC-prostate cancer) | 0.11 | 5.3E−04 | Public CEU-HapMap data |
| rs445114 | rs13254738 (MEC-prostate cancer)¹ | 0.44 | 0.068 | Public CEU-HapMap data |
| rs445114 | rs6983561 (MEC-prostate cancer) | 0.27 | 2.8E−03 | Public CEU-HapMap data |
| rs445114 | rs7000448 (MEC-prostate cancer) | 0.60 | 0.13 | Public CEU-HapMap data |

Shown are the LD-characteristics of the two SNPs on 8q24 discussed in the main text and the various previously published cancer risk variants on 8q24 along with their original publication. No public CEU-HapMap results are available for rs16902094, hence, the data shown are based on in-house genotyping of the 90 CEPH Utah samples used in the HapMap project.

TABLE 4
Results for the Icelandic study population for the five prostate cancer
risk variants on 8q24.21 before and after being adjusted for each other.

| SNP | 8q24 | Control | Unadjusted | | Adjusted* | |
|---|---|---|---|---|---|---|
| [risk allele] | region | frequency | OR | P-value | OR | P-value |
| rs1447295[A] | Region-1 | 0.11 | 1.58 | 2.E−19 | 1.50 | 2.E−05 |
| rs16901979[A] | Region-2 | 0.04 | 1.80 | 2.E−14 | 1.63 | 2.E−10 |
| rs6983267[G] | Region-3 | 0.55 | 1.13 | 8.E−04 | 1.11 | 4.E−03 |
| rs445114[T] | Current | 0.67 | 1.20 | 6.E−06 | 1.17 | 1.E−04 |
| | finding | | | | | |
| rs16902094[G] | Current | 0.14 | 1.32 | 5.E−08 | 1.17 | 3.E−03 |
| | finding | | | | | |

The results shown are based on 1,793 cases and 35,465 controls from Iceland.
*The adjusted results for any one SNP is assessed jointly for the other four SNPs in the table.

TABLE 5
Model-free estimates of the genotype OR for markers on chr 3q21.3, 8q24 and 19q13.2.

| | 3q21.3 | | 8q24 | | 8q24 | | 19q13.2 | |
|---|---|---|---|---|---|---|---|---|
| | rs10934853[A] | | rs16902094[G] | | rs445114[T] | | rs8102476[C] | |
| | Genotypic OR | | Genotypic OR | | Genotypic OR | | Genotypic OR | |
| Study | Heterozygous | Homozygous | Heterozygous | Homozygous | Heterozygous | Homozygous | Heterozygous | Homozygous |
| population | carriers | carriers | carriers | carriers | carriers | carriers | carriers | carriers |
| Iceland | 1.18 | 1.25 | 1.24 | 1.80 | 1.29 | 1.49 | 1.07 | 1.20 |
| The | 1.09 | 1.22 | 1.23 | 1.29 | 1.31 | 1.38 | 1.17 | 1.37 |
| Netherlands | | | | | | | | |
| Spain | 1.02 | 1.04 | 1.26 | 1.22 | 1.13 | 1.33 | 1.14 | 1.39 |
| Chicago | 1.23 | 1.47 | 1.19 | 1.18 | NA | NA | 1.11 | 1.29 |
| Nashville | 1.13 | 1.04 | 1.32 | 2.09 | NA | NA | 1.15 | 1.13 |
| Finland | 1.05 | 1.11 | 1.14 | 1.34 | NA | NA | 1.22 | 1.44 |
| CGEMS^{a} | 1.17 | 1.29 | 1.18 | 1.37 | 1.08 | 1.26 | 1.12 | 1.21 |
| All | 1.11 | 1.21 | 1.22 | 1.47 | 1.20 | 1.37 | 1.14 | 1.29 |
| combined | | | | | | | | |

| | | | | |
|---|---|---|---|---|
| Full-versus | P-value = 0.67 | P-value = 0.81 | P-value = 0.25 | P-value = 0.91 |
| the multi- | | | | |
| plicative | | | | |
| model | | | | |

Shown are the genotypic ORs for heterozygous- and homozygous carriers of the risk alleles of the SNP discussed in the main text.
^{a}The results on 3q21.3-rs10934853 and 8q24-rs16902094 for the CGEMS groups are for the SNPs rs4857841[A] and rs16902104[T], respectively, which are highly correlated with rs10934853 and rs16902094 (D′ > 0.98 and r² > 0.96).
NA = not available.

TABLE 6
Association results in Iceland for variants reported to confer risk of prostate cancer.

| | | | | Frequency | | | |
|---|---|---|---|---|---|---|---|
| Marker, [risk allele] and (correlated marker(s))^{a} | Locus | Cases (N) | Controls (N) | Cases | Controls | OR (95% CI) | P-value |
| rs2710646 [A], (rs721048)⁵ | 2p15 | 1,882 | 35,145 | 0.224 | 0.203 | 1.14 (1.05, 1.24) | 2.5 × 10⁻³ |
| rs2660753 [T]³ | 3p12 | 1,725 | 35,362 | 0.110 | 0.100 | 1.11 (0.99, 1.25) | 0.075 |
| rs401681 [C]⁹ | 5p15 | 1,962 | 35,400 | 0.562 | 0.547 | 1.07 (1.00, 1.14) | 0.066 |
| rs9364554 [T]³ | 6q25 | 1,725 | 35,399 | 0.322 | 0.309 | 1.06 (0.99, 1.15) | 0.11 |
| rs10486567 [G]⁴ | 7p15 | 1,725 | 35,392 | 0.787 | 0.765 | 1.13 (1.04, 1.24) | 4.4 × 10⁻³ |
| rs6465657 [C]³ | 7q21 | 1,724 | 35,358 | 0.432 | 0.421 | 1.04 (0.97, 1.12) | 0.26 |
| rs1447295 [A]⁸ | 8q24 (1) | 1,821 | 35,470 | 0.165 | 0.111 | 1.58 (1.43, 1.74) | 2.2 × 10⁻¹⁹ |
| rs16901979 [A]¹ | 8q24 (2) | 1,726 | 35,403 | 0.073 | 0.042 | 1.80 (1.55, 2.09) | 2.5 × 10⁻¹⁴ |
| rs6983267 [G]⁶ | 8q24 (3) | 1,724 | 35,367 | 0.581 | 0.551 | 1.13 (1.05, 1.22) | 7.5 × 10⁻⁴ |
| rs1571801 [A]⁷ | 9q33^{b} | 1,721 | 35,303 | 0.261 | 0.276 | 0.93 (0.85, 1.01) | 0.068 |
| rs10993994 [T]^{3,4} | 10q11 | 1,727 | 35,397 | 0.410 | 0.384 | 1.11 (1.04, 1.20) | 3.7 × 10⁻³ |
| rs4962416 [C]⁴ | 10q26^{c} | 1,724 | 35,322 | 0.223 | 0.221 | 1.02 (0.94, 1.11) | 0.68 |
| rs10896450 [G], (rs10896449⁴, rs7931342³) | 11q13 | 1,951 | 35,394 | 0.501 | 0.469 | 1.13 (1.06, 1.21) | 2.5 × 10⁻⁴ |
| rs4430796 [A]² | 17q12 | 1,726 | 35,397 | 0.559 | 0.517 | 1.19 (1.10, 1.28) | 8.3 × 10⁻⁶ |
| rs11649743 [G]¹⁰ | 17q12 | 1,747 | 35,405 | 0.812 | 0.799 | 1.09 (0.99, 1.19) | 0.066 |
| rs1859962 [G]² | 17q24.3 | 1,746 | 35,124 | 0.493 | 0.455 | 1.16 (1.08, 1.25) | 3.7 × 10⁻⁵ |
| rs2735839 [G]³ | 19q13.33 | 1,726 | 35,376 | 0.879 | 0.865 | 1.14 (1.02, 1.27) | 0.021 |
| rs9623117 [C]¹¹ | 22q13^{b} | 1,724 | 35,389 | 0.208 | 0.208 | 1.00 (0.91, 1.10) | 0.99 |
| rs5945572 [A]⁵, (rs5945619³) | Xp11 | 1,899 | 35,384 | 0.416 | 0.369 | 1.22 (1.11, 1.34) | 6.1 × 10⁻⁵ |

^{a}Shown in the table are GWAS from Iceland for variants that have been identified through GWAS results (published up to February 2009) and the original publication(s). Highly correlated markers are shown in parenthesis as well as the study reporting them. All P values are two-sided. Shown are the corresponding numbers of cases and controls (N), allelic frequencies of variants in affected and control individuals, the allelic odds-ratio (OR) with 95% confidence interval (95% CI) and P value adjusted for relatedness.
^{b}The original results published for the loci on 9q33⁸ and 22q13¹⁹ were from a study on cases with aggressive prostate cancer. Results for these two loci in Icelandic cases (N = 693) with more aggressive prostate cancer (Gleason score >6 and/or T3 or higher and/or node positive and/or metastatic disease), using the same set of controls, were not significant (rs1571801; OR_{aggr} = 0.90 and P = 0.080, rs9623117; OR_{aggr} = 1.00 and P = 0.94).
^{c}The SNP marker, rs4962416, at the 10q26 locus is not on the Illumina Hap300 chip, results shown for it are based on a weighted combination of two marker haplotype generated from rs7077275 and rs893856 that are present on the chip and tag the SNP (rs4962416).
References:
¹Gudmundsson, J. et al. Genome-wide association study identifies a second prostate cancer susceptibility variant at 8q24. Nat Genet 39, 631-7 (2007).
²Gudmundsson, J. et al. Two variants on chromosome 17 confer prostate cancer risk, and the one in TCF2 protects against type 2 diabetes. Nat Genet 39, 977-83 (2007).
³Eeles, R. A. et al. Multiple newly identified loci associated with prostate cancer susceptibility. Nat Genet 40, 316-21 (2008).
⁴Thomas, G. et al. Multiple loci identified in a genome-wide association study of prostate cancer. Nat Genet 40, 310-5 (2008).
⁵Gudmundsson, J. et al. Common sequence variants on 2p15 and Xp11.22 confer susceptibility to prostate cancer. Nat Genet 40, 281-3 (2008).
⁶Yeager, M. et al. Genome-wide association study of prostate cancer identifies a second risk locus at 8q24. Nat Genet 39, 645-9 (2007).
⁷Duggan, D. et al. Two genome-wide association studies of aggressive prostate cancer implicate putative prostate tumor suppressor gene DAB2IP. J Natl Cancer Inst 99, 1836-44 (2007).
⁸Amundadottir, L. T. et al. A common variant associated with prostate cancer in European and African populations. Nat Genet 38, 652-8 (2006).
⁹Rafnar, T. et al. Sequence variants at the TERT-CLPTM1L locus associate with many cancer types. Nat Genet 41, 221-7 (2009).
¹⁰Sun, J. et al. Evidence for two independent prostate cancer risk-associated loci in the HNF1B gene at 17q12. Nat Genet 40, 1153-5 (2008).
¹¹Sun, J. et al. Sequence variants at 22q13 are associated with prostate cancer risk. Cancer Res 69, 10-5 (2009).

TABLE 7
Population distribution in Iceland of ORs for 22 prostate cancer
susceptibility variants.
Results from a multi-variant risk model analysis for prostate cancer in
Iceland based on susceptibility variants in tables 1 and 2. Results from
Iceland were used for all variants in table 1 and 2, except rs1571801 on
9q33 since its effect was in the opposite direction, and rs10896450 on
11q13 for which data for the refinement SNP in table 1 was used.
Odds ratios (OR) were calculated for all possible genotype combinations
based on 22 variants and expressed relative to the average general
population risk, assuming the multiplicative model between variants. The
combined OR estimates were then divided into OR-ranges and presented
along with the percentage of the population within each OR-range. The
general population risk was determined using a frequency-weighted
average risk for all possible genotypes.

| OR-range | Population percentage |
|---|---|
| <0.5 | 9.5% |
| 0.5-0.75 | 25.2% |
| 0.75-1 | 24.7% |
| 1-1.5 | 27.6% |
| 1.5-2 | 9.1% |
| 2-2.5 | 2.7% |
| >2.5 | 1.3% |

TABLE 8
Surrogate markers (based on HapMap CEU sample set; http://www.hapmap.org) on
Chromosome 3q21.3 with r² > 0.1 to rs10934853. Shown is; Surrogate marker name,
Anchor marker, the allele that is correlated with risk-allele of the anchor-marker, position of
surrogate marker in in NCBI Build 36, and D′, r2, and P-value of the correlation between
the markers. Allelic codes are A = 1, C = 2, G = 3, T = 4.

| | Anchor | | Pos in NCBI | | | | Seq |
|---|---|---|---|---|---|---|---|
| Marker | Marker | Allele | Build 36 | D′ | r2 | P-value | ID No: |
| rs4974416 | rs10934853 | 4 | 129060479 | 0.549015 | 0.104988 | 0.001394 | 5 |
| rs13095214 | rs10934853 | 2 | 129067204 | 0.340236 | 0.101148 | 0.002273 | 6 |
| rs11923862 | rs10934853 | 2 | 129067608 | 0.340236 | 0.101148 | 0.002273 | 7 |
| rs1543272 | rs10934853 | 4 | 129070913 | 0.340236 | 0.101148 | 0.002273 | 8 |
| rs6439086 | rs10934853 | 4 | 129072926 | 0.340236 | 0.101148 | 0.002273 | 9 |
| rs7644239 | rs10934853 | 4 | 129073582 | 0.340236 | 0.101148 | 0.002273 | 10 |
| rs7625264 | rs10934853 | 1 | 129074370 | 0.348986 | 0.109577 | 0.001701 | 11 |
| rs11921463 | rs10934853 | 3 | 129076449 | 0.340236 | 0.101148 | 0.002273 | 12 |
| rs13080277 | rs10934853 | 3 | 129076862 | 0.340236 | 0.101148 | 0.002273 | 13 |
| rs11926127 | rs10934853 | 3 | 129077438 | 0.340236 | 0.101148 | 0.002273 | 14 |
| rs7649674 | rs10934853 | 1 | 129078747 | 0.340236 | 0.101148 | 0.002273 | 15 |
| rs7616277 | rs10934853 | 1 | 129085350 | 0.340236 | 0.101148 | 0.002273 | 16 |
| rs6439094 | rs10934853 | 1 | 129111059 | 0.510683 | 0.103696 | 0.001284 | 17 |
| rs16838982 | rs10934853 | 2 | 129121762 | 0.430823 | 0.119625 | 0.000626 | 18 |
| rs2053016 | rs10934853 | 3 | 129127878 | 0.430823 | 0.119625 | 0.000626 | 19 |
| rs17203687 | rs10934853 | 4 | 129167438 | 0.629248 | 0.115111 | 0.000603 | 20 |
| rs16845806 | rs10934853 | 1 | 129193164 | 0.689141 | 0.241347 | 1.35E−06 | 21 |
| rs7630727 | rs10934853 | 2 | 129196138 | 0.773660 | 0.302088 | 6.54E−09 | 22 |
| rs1549876 | rs10934853 | 2 | 129197301 | 0.769894 | 0.289042 | 1.37E−08 | 23 |
| rs17282209 | rs10934853 | 2 | 129197886 | 1 | 0.318996 | 1.42E−09 | 24 |
| rs6439104 | rs10934853 | 2 | 129200392 | 0.912714 | 0.368255 | 9.89E−10 | 25 |
| rs1469659 | rs10934853 | 1 | 129203430 | 0.913656 | 0.368706 | 8.64E−10 | 26 |
| rs7611430 | rs10934853 | 3 | 129205905 | 0.760316 | 0.299946 | 2.38E−08 | 27 |
| rs6770337 | rs10934853 | 3 | 129207423 | 0.773660 | 0.302088 | 6.54E−09 | 28 |
| rs6777095 | rs10934853 | 1 | 129209327 | 1 | 0.213196 | 5.65E−06 | 29 |
| rs4602341 | rs10934853 | 1 | 129215781 | 1 | 0.409061 | 1.48E−11 | 30 |
| rs4857833 | rs10934853 | 3 | 129228387 | 0.836054 | 0.378151 | 9.54E−11 | 31 |
| rs6439108 | rs10934853 | 3 | 129228455 | 0.837551 | 0.387358 | 6.61E−11 | 32 |
| rs6764517 | rs10934853 | 1 | 129230531 | 1 | 0.302558 | 2.89E−08 | 33 |
| rs981447 | rs10934853 | 2 | 129236378 | 0.836054 | 0.378151 | 9.54E−11 | 34 |
| rs981446 | rs10934853 | 2 | 129236420 | 0.836054 | 0.378151 | 9.54E−11 | 35 |
| rs1469658 | rs10934853 | 1 | 129241904 | 1 | 0.441687 | 7.93E−13 | 36 |
| rs2335772 | rs10934853 | 2 | 129255226 | 0.840541 | 0.215326 | 2.03E−06 | 37 |
| rs1030656 | rs10934853 | 2 | 129256317 | 0.836054 | 0.378151 | 9.54E−11 | 38 |
| rs1030655 | rs10934853 | 1 | 129256366 | 0.830046 | 0.371256 | 2.89E−10 | 39 |
| rs2335771 | rs10934853 | 4 | 129262634 | 0.834997 | 0.374233 | 2.05E−10 | 40 |
| rs759945 | rs10934853 | 2 | 129262772 | 0.834088 | 0.385687 | 6.07E−09 | 41 |
| rs2075402 | rs10934853 | 3 | 129266952 | 0.836054 | 0.378151 | 9.54E−11 | 42 |
| rs1554534 | rs10934853 | 2 | 129282359 | 1 | 0.441687 | 7.93E−13 | 43 |
| rs3732402 | rs10934853 | 3 | 129288908 | 0.835070 | 0.387916 | 9.74E−11 | 44 |
| rs13091198 | rs10934853 | 4 | 129294727 | 0.778665 | 0.222860 | 0.000015 | 45 |
| rs11714052 | rs10934853 | 1 | 129297147 | 1 | 0.318996 | 1.42E−09 | 46 |
| rs6439113 | rs10934853 | 1 | 129299262 | 1 | 0.441687 | 7.93E−13 | 47 |
| rs6787614 | rs10934853 | 1 | 129300168 | 0.893981 | 0.282978 | 2.99E−07 | 48 |
| rs11720239 | rs10934853 | 3 | 129300645 | 1 | 0.318996 | 1.42E−09 | 49 |
| rs11715661 | rs10934853 | 4 | 129303536 | 1 | 0.318996 | 1.42E−09 | 50 |
| rs7641133 | rs10934853 | 4 | 129305010 | 1 | 0.873773 | 6.98E−26 | 51 |
| rs11924142 | rs10934853 | 2 | 129309308 | 1 | 0.441687 | 7.93E−13 | 52 |
| rs7650365 | rs10934853 | 3 | 129316693 | 0.851607 | 0.228552 | 2.97E−07 | 53 |
| rs6788879 | rs10934853 | 1 | 129318319 | 1 | 0.441687 | 7.93E−13 | 54 |
| rs6439115 | rs10934853 | 2 | 129318493 | 1 | 0.458763 | 4.98E−13 | 55 |
| rs4857836 | rs10934853 | 2 | 129318977 | 1 | 0.869707 | 4.67E−25 | 56 |
| rs4857837 | rs10934853 | 1 | 129319009 | 1 | 0.873773 | 6.98E−26 | 57 |
| rs11707462 | rs10934853 | 2 | 129321320 | 1 | 0.318996 | 1.42E−09 | 58 |
| rs9821568 | rs10934853 | 3 | 129321689 | 1 | 0.441687 | 7.93E−13 | 59 |
| rs6784159 | rs10934853 | 2 | 129326068 | 1 | 0.318996 | 1.42E−09 | 60 |
| rs2811475 | rs10934853 | 2 | 129328391 | 1 | 0.441687 | 7.93E−13 | 61 |
| rs13095660 | rs10934853 | 4 | 129330846 | 1 | 0.318996 | 1.42E−09 | 62 |
| rs6439116 | rs10934853 | 2 | 129331757 | 1 | 0.318996 | 1.42E−09 | 63 |
| rs6414310 | rs10934853 | 4 | 129339263 | 1 | 0.873773 | 6.98E−26 | 64 |
| rs2955102 | rs10934853 | 3 | 129348200 | 1 | 0.873773 | 6.98E−26 | 65 |
| rs11920225 | rs10934853 | 3 | 129354865 | 1 | 0.441687 | 7.93E−13 | 66 |
| rs11709066 | rs10934853 | 1 | 129357602 | 1 | 0.318996 | 1.42E−09 | 67 |
| rs11716941 | rs10934853 | 3 | 129358064 | 1 | 0.318996 | 1.42E−09 | 68 |
| rs2811472 | rs10934853 | 3 | 129361561 | 1 | 0.441687 | 7.93E−13 | 69 |
| rs13077913 | rs10934853 | 1 | 129365294 | 1 | 0.160178 | 0.000056 | 70 |
| rs13077790 | rs10934853 | 4 | 129365348 | 1 | 0.318996 | 1.42E−09 | 71 |
| rs2811473 | rs10934853 | 2 | 129367627 | 1 | 0.441687 | 7.93E−13 | 72 |
| rs2687728 | rs10934853 | 4 | 129367698 | 1 | 0.441687 | 7.93E−13 | 73 |
| rs10934850 | rs10934853 | 1 | 129369647 | 1 | 0.318996 | 1.42E−09 | 74 |
| rs872267 | rs10934853 | 4 | 129370757 | 1 | 0.873773 | 6.98E−26 | 75 |
| rs2687731 | rs10934853 | 4 | 129371384 | 1 | 0.442786 | 2.01E−12 | 76 |
| rs3122174 | rs10934853 | 3 | 129372065 | 1 | 0.458763 | 4.28E−13 | 77 |
| rs2999051 | rs10934853 | 2 | 129372094 | 0.943681 | 0.496406 | 5.84E−14 | 78 |
| rs13067650 | rs10934853 | 1 | 129372232 | 1 | 0.318996 | 1.58E−09 | 79 |
| rs2248668 | rs10934853 | 2 | 129373439 | 0.916396 | 0.384339 | 4.99E−10 | 80 |
| rs2955121 | rs10934853 | 3 | 129374086 | 1 | 0.441687 | 7.93E−13 | 81 |
| rs11706455 | rs10934853 | 1 | 129374681 | 1 | 0.311800 | 5.35E−09 | 82 |
| rs2999052 | rs10934853 | 2 | 129374727 | 1 | 0.873773 | 6.98E−26 | 83 |
| rs11715394 | rs10934853 | 4 | 129376254 | 1 | 0.318996 | 1.42E−09 | 84 |
| rs2687729 | rs10934853 | 2 | 129377916 | 1 | 0.873773 | 6.98E−26 | 85 |
| rs2811478 | rs10934853 | 4 | 129382314 | 1 | 0.162113 | 0.000023 | 86 |
| rs2999060 | rs10934853 | 2 | 129383184 | 1 | 0.441687 | 7.93E−13 | 87 |
| rs2999056 | rs10934853 | 1 | 129386212 | 1 | 0.407825 | 3.02E−11 | 88 |
| rs2955123 | rs10934853 | 2 | 129386368 | 1 | 0.477212 | 2.20E−13 | 89 |
| rs2811517 | rs10934853 | 3 | 129386880 | 1 | 0.425837 | 8.26E−12 | 90 |
| rs2811516 | rs10934853 | 2 | 129388141 | 0.895338 | 0.702716 | 2.16E−16 | 91 |
| rs2811515 | rs10934853 | 4 | 129388208 | 1 | 0.873773 | 6.98E−26 | 92 |
| rs2811514 | rs10934853 | 2 | 129390619 | 1 | 0.869707 | 6.10E−25 | 93 |
| rs2811512 | rs10934853 | 4 | 129394510 | 1 | 0.873773 | 6.98E−26 | 94 |
| rs2811511 | rs10934853 | 4 | 129395678 | 1 | 0.300399 | 5.76E−09 | 95 |
| rs883238 | rs10934853 | 3 | 129395953 | 1 | 0.873773 | 6.98E−26 | 96 |
| rs940061 | rs10934853 | 3 | 129396404 | 1 | 0.441687 | 7.93E−13 | 97 |
| rs2811510 | rs10934853 | 2 | 129397202 | 1 | 0.441687 | 7.93E−13 | 98 |
| rs2811483 | rs10934853 | 2 | 129397363 | 1 | 0.441687 | 7.93E−13 | 99 |
| rs2811484 | rs10934853 | 1 | 129397543 | 1 | 0.441687 | 7.93E−13 | 100 |
| rs2687730 | rs10934853 | 4 | 129398147 | 1 | 0.318996 | 1.58E−09 | 101 |
| rs2811509 | rs10934853 | 4 | 129399241 | 1 | 0.873773 | 9.12E−26 | 102 |
| rs2492285 | rs10934853 | 1 | 129400690 | 1 | 0.873773 | 6.98E−26 | 103 |
| rs2687720 | rs10934853 | 1 | 129401645 | 1 | 0.873773 | 9.12E−26 | 104 |
| rs2811508 | rs10934853 | 3 | 129402713 | 1 | 0.873773 | 6.98E−26 | 105 |
| rs2811486 | rs10934853 | 3 | 129402765 | 1 | 0.318996 | 1.42E−09 | 106 |
| rs6439119 | rs10934853 | 4 | 129405877 | 1 | 0.865370 | 1.08E−24 | 107 |
| rs2955125 | rs10934853 | 3 | 129407882 | 1 | 0.441687 | 7.93E−13 | 108 |
| rs2955126 | rs10934853 | 1 | 129408944 | 1 | 0.300399 | 6.38E−09 | 109 |
| rs2955127 | rs10934853 | 3 | 129409206 | 1 | 0.441687 | 7.93E−13 | 110 |
| rs4293718 | rs10934853 | 3 | 129411810 | 0.878205 | 0.119753 | 0.000084 | 111 |
| rs2955129 | rs10934853 | 4 | 129411897 | 1 | 0.318996 | 1.42E−09 | 112 |
| rs7374072 | rs10934853 | 2 | 129413556 | 1 | 0.910646 | 2.53E−26 | 113 |
| rs2999090 | rs10934853 | 2 | 129414030 | 1 | 0.318996 | 1.42E−09 | 114 |
| rs7372439 | rs10934853 | 1 | 129414092 | 1 | 0.873773 | 6.98E−26 | 115 |
| rs4857871 | rs10934853 | 2 | 129416476 | 1 | 0.873773 | 6.98E−26 | 116 |
| rs4857872 | rs10934853 | 4 | 129416512 | 1 | 0.826087 | 1.31E−19 | 117 |
| rs4857873 | rs10934853 | 1 | 129416908 | 1 | 0.873773 | 6.98E−26 | 118 |
| rs6770140 | rs10934853 | 4 | 129417019 | 1 | 0.873773 | 6.98E−26 | 119 |
| rs4384971 | rs10934853 | 2 | 129417464 | 1 | 0.873773 | 6.98E−26 | 120 |
| rs2999089 | rs10934853 | 3 | 129417849 | 1 | 0.300399 | 5.76E−09 | 121 |
| rs6439121 | rs10934853 | 3 | 129418151 | 0.951760 | 0.830101 | 1.99E−22 | 122 |
| rs2254379 | rs10934853 | 2 | 129420016 | 1 | 0.441687 | 7.93E−13 | 123 |
| rs2955130 | rs10934853 | 3 | 129420504 | 1 | 0.318996 | 1.42E−09 | 124 |
| rs9814834 | rs10934853 | 3 | 129420827 | 1 | 0.873773 | 6.98E−26 | 125 |
| rs2955132 | rs10934853 | 2 | 129422916 | 1 | 0.441687 | 7.93E−13 | 126 |
| rs9845651 | rs10934853 | 4 | 129423043 | 1 | 0.873773 | 6.98E−26 | 127 |
| rs6439122 | rs10934853 | 1 | 129423224 | 1 | 0.873773 | 6.98E−26 | 128 |
| rs9873786 | rs10934853 | 1 | 129425069 | 1 | 0.873773 | 6.98E−26 | 129 |
| rs4857838 | rs10934853 | 1 | 129426018 | 1 | 0.873773 | 6.98E−26 | 130 |
| rs6775988 | rs10934853 | 2 | 129427167 | 1 | 0.873773 | 6.98E−26 | 131 |
| rs9830294 | rs10934853 | 3 | 129429478 | 1 | 0.873773 | 6.98E−26 | 132 |
| rs4857877 | rs10934853 | 1 | 129430750 | 1 | 0.865370 | 1.08E−24 | 133 |
| rs2999086 | rs10934853 | 3 | 129433938 | 1 | 0.318996 | 1.42E−09 | 134 |
| rs2999085 | rs10934853 | 2 | 129434249 | 1 | 0.280757 | 2.62E−08 | 135 |
| rs2999084 | rs10934853 | 4 | 129435178 | 1 | 0.300399 | 5.76E−09 | 136 |
| rs2999083 | rs10934853 | 3 | 129437124 | 1 | 0.318996 | 1.42E−09 | 137 |
| rs2999081 | rs10934853 | 4 | 129438962 | 1 | 0.270517 | 3.37E−08 | 138 |
| rs2999079 | rs10934853 | 1 | 129439922 | 1 | 0.270517 | 7.10E−08 | 139 |
| rs4074440 | rs10934853 | 2 | 129440703 | 1 | 0.873773 | 9.12E−26 | 140 |
| rs2955077 | rs10934853 | 1 | 129441559 | 1 | 0.135053 | 0.000277 | 141 |
| rs9843281 | rs10934853 | 1 | 129444086 | 1 | 0.873773 | 9.12E−26 | 142 |
| rs2999073 | rs10934853 | 2 | 129445019 | 1 | 0.300399 | 6.38E−09 | 143 |
| rs2955085 | rs10934853 | 3 | 129445447 | 1 | 0.318996 | 1.42E−09 | 144 |
| rs2999072 | rs10934853 | 2 | 129445566 | 1 | 0.318996 | 1.42E−09 | 145 |
| rs13434079 | rs10934853 | 1 | 129446138 | 1 | 0.873773 | 6.98E−26 | 146 |
| rs2955088 | rs10934853 | 2 | 129446400 | 1 | 0.318996 | 1.42E−09 | 147 |
| rs2999070 | rs10934853 | 2 | 129447341 | 1 | 0.318996 | 1.42E−09 | 148 |
| rs17343355 | rs10934853 | 2 | 129449481 | 0.840753 | 0.208333 | 1.84E−06 | 149 |
| rs2955090 | rs10934853 | 4 | 129452061 | 1 | 0.318996 | 1.42E−09 | 150 |
| rs2955091 | rs10934853 | 3 | 129454051 | 1 | 0.318996 | 1.42E−09 | 151 |
| rs2999069 | rs10934853 | 3 | 129454299 | 1 | 0.318996 | 1.42E−09 | 152 |
| rs2955092 | rs10934853 | 2 | 129455218 | 1 | 0.318996 | 1.58E−09 | 153 |
| rs2955094 | rs10934853 | 1 | 129459613 | 1 | 0.318996 | 1.42E−09 | 154 |
| rs2955095 | rs10934853 | 1 | 129460355 | 1 | 0.318996 | 1.42E−09 | 155 |
| rs2955096 | rs10934853 | 1 | 129460556 | 1 | 0.318996 | 1.42E−09 | 156 |
| rs2999068 | rs10934853 | 1 | 129460668 | 1 | 0.255935 | 1.34E−07 | 157 |
| rs2999067 | rs10934853 | 3 | 129461221 | 1 | 0.255935 | 1.22E−07 | 158 |
| rs2955099 | rs10934853 | 3 | 129462344 | 1 | 0.318996 | 1.42E−09 | 159 |
| rs2999066 | rs10934853 | 1 | 129462976 | 1 | 0.318996 | 1.42E−09 | 160 |
| rs2999065 | rs10934853 | 4 | 129464128 | 1 | 0.300399 | 5.76E−09 | 161 |
| rs2811545 | rs10934853 | 3 | 129465838 | 1 | 0.291803 | 2.21E−08 | 162 |
| rs2999035 | rs10934853 | 4 | 129465899 | 1 | 0.407825 | 4.54E−11 | 163 |
| rs2811544 | rs10934853 | 1 | 129466185 | 1 | 0.318996 | 1.42E−09 | 164 |
| rs2811543 | rs10934853 | 1 | 129466486 | 1 | 0.300399 | 6.38E−09 | 165 |
| rs2811541 | rs10934853 | 3 | 129467484 | 1 | 0.300399 | 9.60E−09 | 166 |
| rs2811540 | rs10934853 | 1 | 129468259 | 1 | 0.246449 | 1.68E−07 | 167 |
| rs2811539 | rs10934853 | 3 | 129469163 | 1 | 0.289731 | 8.29E−09 | 168 |
| rs2811538 | rs10934853 | 4 | 129469321 | 1 | 0.318996 | 1.42E−09 | 169 |
| rs2811396 | rs10934853 | 1 | 129470046 | 1 | 0.300399 | 7.83E−09 | 170 |
| rs2811400 | rs10934853 | 3 | 129470557 | 1 | 0.317266 | 4.24E−09 | 171 |
| rs2811537 | rs10934853 | 4 | 129470614 | 1 | 0.318996 | 1.42E−09 | 172 |
| rs2999064 | rs10934853 | 2 | 129470930 | 0.838076 | 0.387783 | 4.45E−09 | 173 |
| rs2811536 | rs10934853 | 4 | 129471609 | 1 | 0.280757 | 3.18E−08 | 174 |
| rs2811534 | rs10934853 | 4 | 129473798 | 1 | 0.289731 | 9.15E−09 | 175 |
| rs2811413 | rs10934853 | 2 | 129473839 | 0.867809 | 0.721362 | 9.63E−20 | 176 |
| rs2811415 | rs10934853 | 1 | 129474217 | 0.709631 | 0.208846 | 0.000010 | 177 |
| rs2811533 | rs10934853 | 2 | 129474419 | 1 | 0.318996 | 1.42E−09 | 178 |
| rs2811416 | rs10934853 | 4 | 129474628 | 1 | 0.336138 | 7.43E−10 | 179 |
| rs2811532 | rs10934853 | 2 | 129474860 | 1 | 0.300399 | 7.83E−09 | 180 |
| rs2811531 | rs10934853 | 2 | 129475185 | 1 | 0.280757 | 3.18E−08 | 181 |
| rs2955100 | rs10934853 | 3 | 129476015 | 1 | 0.318996 | 2.72E−09 | 182 |
| rs2999061 | rs10934853 | 4 | 129476313 | 1 | 0.318996 | 1.42E−09 | 183 |
| rs2811529 | rs10934853 | 2 | 129476850 | 1 | 0.873773 | 6.98E−26 | 184 |
| rs2811527 | rs10934853 | 4 | 129477294 | 1 | 0.318996 | 1.42E−09 | 185 |
| rs2811373 | rs10934853 | 4 | 129480119 | 1 | 0.318996 | 1.42E−09 | 186 |
| rs2811525 | rs10934853 | 1 | 129482120 | 1 | 0.318996 | 1.42E−09 | 187 |
| rs7374952 | rs10934853 | 4 | 129484057 | 1 | 0.300399 | 6.38E−09 | 188 |
| rs7374227 | rs10934853 | 3 | 129484205 | 1 | 0.318996 | 1.42E−09 | 189 |
| rs4593050 | rs10934853 | 4 | 129487221 | 1 | 0.318996 | 1.42E−09 | 190 |
| rs6439124 | rs10934853 | 1 | 129490156 | 1 | 0.318996 | 1.42E−09 | 191 |
| rs7373998 | rs10934853 | 1 | 129490913 | 1 | 0.318996 | 1.42E−09 | 192 |
| rs2955101 | rs10934853 | 1 | 129492302 | 1 | 0.318996 | 1.42E−09 | 193 |
| rs2811519 | rs10934853 | 1 | 129495566 | 1 | 0.300399 | 5.76E−09 | 194 |
| rs2811518 | rs10934853 | 2 | 129496335 | 1 | 0.318996 | 1.42E−09 | 195 |
| rs2955103 | rs10934853 | 2 | 129497926 | 0.891861 | 0.445697 | 7.84E−13 | 196 |
| rs2811388 | rs10934853 | 1 | 129501137 | 1 | 0.318996 | 1.42E−09 | 197 |
| rs2999036 | rs10934853 | 3 | 129503391 | 1 | 0.318996 | 1.42E−09 | 198 |
| rs2811390 | rs10934853 | 4 | 129504171 | 1 | 0.318996 | 1.42E−09 | 199 |
| rs2811391 | rs10934853 | 1 | 129505058 | 1 | 0.318996 | 1.58E−09 | 200 |
| rs2811393 | rs10934853 | 4 | 129506689 | 1 | 0.311883 | 4.81E−09 | 201 |
| rs2037965 | rs10934853 | 3 | 129507734 | 1 | 0.318996 | 1.42E−09 | 202 |
| rs2811397 | rs10934853 | 2 | 129509927 | 1 | 0.361902 | 2.73E−10 | 203 |
| rs6805582 | rs10934853 | 1 | 129511698 | 1 | 0.318996 | 1.42E−09 | 204 |
| rs6805621 | rs10934853 | 4 | 129511894 | 1 | 0.318996 | 1.76E−09 | 205 |
| rs6794591 | rs10934853 | 4 | 129513909 | 1 | 0.318996 | 1.76E−09 | 206 |
| rs16843876 | rs10934853 | 3 | 129515230 | 1 | 0.318996 | 1.42E−09 | 207 |
| rs11706852 | rs10934853 | 1 | 129515577 | 1 | 0.318996 | 1.42E−09 | 208 |
| rs11706826 | rs10934853 | 4 | 129515681 | 1 | 0.318996 | 1.42E−09 | 209 |
| rs11706908 | rs10934853 | 1 | 129515738 | 1 | 0.318996 | 1.42E−09 | 210 |
| rs6771646 | rs10934853 | 3 | 129517225 | 1 | 0.318996 | 1.42E−09 | 211 |
| rs13095166 | rs10934853 | 4 | 129519476 | 1 | 0.540083 | 1.62E−15 | 212 |
| rs10934853 | rs10934853 | 1 | 129521063 | 1 | 1 | 0 | 213 |
| rs12486127 | rs10934853 | 1 | 129521379 | 1 | 0.571734 | 3.59E−15 | 214 |
| rs12486156 | rs10934853 | 4 | 129521524 | 1 | 0.526627 | 6.46E−15 | 215 |
| rs11708733 | rs10934853 | 1 | 129522585 | 1 | 0.129173 | 0.000144 | 216 |
| rs6772407 | rs10934853 | 4 | 129527062 | 1 | 0.318996 | 1.42E−09 | 217 |
| rs4857841 | rs10934853 | 1 | 129529333 | 1 | 1 | 1.14E−31 | 218 |
| rs11710704 | rs10934853 | 1 | 129529926 | 1 | 0.318996 | 1.42E−09 | 219 |
| rs16844002 | rs10934853 | 4 | 129536177 | 1 | 0.318996 | 1.42E−09 | 220 |
| rs6798749 | rs10934853 | 1 | 129539587 | 1 | 0.318996 | 1.42E−09 | 221 |
| rs1735558 | rs10934853 | 4 | 129542300 | 1 | 0.506641 | 1.36E−14 | 222 |
| rs4857879 | rs10934853 | 2 | 129546808 | 1 | 0.540083 | 1.62E−15 | 223 |
| rs11721213 | rs10934853 | 4 | 129550131 | 1 | 0.318996 | 1.42E−09 | 224 |
| rs1735549 | rs10934853 | 1 | 129554499 | 1 | 0.743448 | 7.86E−21 | 225 |
| rs1735546 | rs10934853 | 2 | 129558088 | 1 | 0.780702 | 8.12E−22 | 226 |
| rs12632366 | rs10934853 | 3 | 129560248 | 0.910338 | 0.213353 | 6.32E−07 | 227 |
| rs1735545 | rs10934853 | 3 | 129563950 | 1 | 0.755518 | 7.24E−22 | 228 |
| rs1702122 | rs10934853 | 2 | 129566022 | 0.945706 | 0.675705 | 1.17E−17 | 229 |
| rs1108313 | rs10934853 | 2 | 129567780 | 0.912756 | 0.221910 | 3.58E−07 | 230 |
| rs1735538 | rs10934853 | 2 | 129574792 | 0.899287 | 0.674071 | 2.83E−17 | 231 |
| rs1702119 | rs10934853 | 3 | 129577183 | 0.947283 | 0.712980 | 1.03E−18 | 232 |
| rs1702118 | rs10934853 | 2 | 129577968 | 1 | 0.379184 | 4.19E−11 | 233 |
| rs3021461 | rs10934853 | 3 | 129578342 | 1 | 0.717742 | 1.10E−20 | 234 |
| rs2977565 | rs10934853 | 4 | 129578457 | 1 | 0.717742 | 1.10E−20 | 235 |
| rs2293947 | rs10934853 | 3 | 129580186 | 1 | 0.260997 | 4.66E−08 | 236 |
| rs741925 | rs10934853 | 4 | 129592606 | 1 | 0.379184 | 3.69E−11 | 237 |
| rs729847 | rs10934853 | 4 | 129593460 | 0.759508 | 0.517548 | 5.79E−13 | 238 |
| rs1702134 | rs10934853 | 4 | 129593891 | 0.910626 | 0.381317 | 1.03E−08 | 239 |
| rs1620440 | rs10934853 | 2 | 129594997 | 1 | 0.379184 | 3.69E−11 | 240 |
| rs7632169 | rs10934853 | 2 | 129597277 | 0.734951 | 0.533499 | 1.93E−13 | 241 |
| rs1735527 | rs10934853 | 2 | 129598071 | 1 | 0.361902 | 1.89E−10 | 242 |
| rs760383 | rs10934853 | 2 | 129602255 | 0.757203 | 0.500983 | 4.52E−13 | 243 |
| rs11705709 | rs10934853 | 3 | 129602564 | 0.623665 | 0.161261 | 0.000073 | 244 |
| rs11705891 | rs10934853 | 3 | 129603045 | 0.633150 | 0.164416 | 0.000056 | 245 |
| rs2999031 | rs10934853 | 4 | 129604192 | 0.901429 | 0.179119 | 3.69E−06 | 246 |
| rs6780368 | rs10934853 | 4 | 129604729 | 1 | 0.330855 | 1.06E−09 | 247 |
| rs2659685 | rs10934853 | 1 | 129605086 | 0.773981 | 0.573281 | 3.63E−15 | 248 |
| rs11715947 | rs10934853 | 4 | 129605270 | 0.633150 | 0.164416 | 0.000056 | 249 |
| rs1735537 | rs10934853 | 3 | 129605510 | 0.728411 | 0.507762 | 2.20E−13 | 250 |
| rs11717030 | rs10934853 | 1 | 129605978 | 0.633150 | 0.164416 | 0.000056 | 251 |
| rs2977564 | rs10934853 | 2 | 129606476 | 1 | 0.201656 | 4.61E−09 | 252 |
| rs2939820 | rs10934853 | 3 | 129610333 | 0.811599 | 0.128124 | 0.000053 | 253 |
| rs3828417 | rs10934853 | 2 | 129610944 | 0.798189 | 0.113308 | 0.001103 | 254 |
| rs4527399 | rs10934853 | 2 | 129620819 | 1 | 0.106079 | 0.000632 | 255 |
| rs4521245 | rs10934853 | 3 | 129620888 | 1 | 0.124825 | 0.000166 | 256 |
| rs1806462 | rs10934853 | 3 | 129689308 | 0.638929 | 0.104036 | 0.000908 | 257 |
| rs2860228 | rs10934853 | 3 | 129692357 | 0.819443 | 0.165843 | 0.000019 | 258 |
| rs9851497 | rs10934853 | 4 | 129695216 | 0.410144 | 0.108815 | 0.001271 | 259 |
| rs6789646 | rs10934853 | 4 | 129698465 | 0.658655 | 0.107934 | 0.000395 | 260 |
| rs7629791 | rs10934853 | 3 | 129701100 | 0.590491 | 0.129826 | 0.000185 | 261 |
| rs2713576 | rs10934853 | 2 | 129705990 | 0.658655 | 0.107934 | 0.000395 | 262 |
| rs2659698 | rs10934853 | 2 | 129709054 | 0.410144 | 0.108815 | 0.001271 | 263 |

TABLE 9
Surrogate markers (based on HapMap CEU sample set; http://www.hapmap.org) on
Chromosome 8q24.21 with r² > 0.1 to rs16902094. Shown is; Surrogate marker
name, Anchor marker, the allele that is correlated with risk-allele of the anchor-marker,
position of the surrogate marker in NCBI Build 36, D′, r², and P-value of the
correlation between the markers. Allelic codes are A = 1, C = 2, G = 3, T = 4.

| | Anchor | | Pos in NCBI | | | | Seq |
|---|---|---|---|---|---|---|---|
| Marker | Marker | Allele | Build 36 | D′ | r2 | P-valuE | ID No: |
| rs1840709 | rs16902094 | 2 | 128168637 | 0.663762 | 0.152714 | 0.000102 | 264 |
| rs3857883 | rs16902094 | 2 | 128169788 | 0.721346 | 0.144433 | 0.000112 | 265 |
| rs1456316 | rs16902094 | 4 | 128170030 | 0.722980 | 0.146763 | 0.000097 | 266 |
| rs1456315 | rs16902094 | 1 | 128173119 | 0.620969 | 0.124235 | 0.000718 | 267 |
| rs7006409 | rs16902094 | 3 | 128180611 | 0.529036 | 0.106428 | 0.004138 | 268 |
| rs4871775 | rs16902094 | 2 | 128340277 | 0.359594 | 0.102769 | 0.003347 | 269 |
| rs4871779 | rs16902094 | 3 | 128348189 | 0.437239 | 0.110395 | 0.001125 | 270 |
| rs13251915 | rs16902094 | 4 | 128377137 | 0.646468 | 0.221140 | 3.49E−06 | 271 |
| rs283720 | rs16902094 | 1 | 128379147 | 0.706547 | 0.233649 | 1.18E−06 | 272 |
| rs283704 | rs16902094 | 2 | 128384764 | 1.000.000 | 0.117647 | 5.15E−06 | 273 |
| rs283705 | rs16902094 | 4 | 128386632 | 0.861315 | 0.100497 | 0.000306 | 274 |
| rs16902094 | rs16902094 | 3 | 128389528 | 1 | 1 | | 275 |
| rs453875 | rs16902094 | 2 | 128390593 | 0.883915 | 0.132375 | 0.000022 | 276 |
| 5G0851738 | rs16902094 | 2 | 128390595 | 1 | 0.942761 | 6.70E−35 | 277 |
| rs11785664 | rs16902094 | 4 | 128399606 | 1.000.000 | 0.109375 | 9.75E−06 | 278 |
| rs622556 | rs16902094 | 3 | 128402379 | 1.000.000 | 0.150442 | 4.71E−07 | 279 |
| rs452529 | rs16902094 | 3 | 128402441 | 1.000.000 | 0.150442 | 4.71E−07 | 280 |
| rs400818 | rs16902094 | 3 | 128405728 | 1.000.000 | 0.155689 | 3.27E−07 | 281 |
| rs386883 | rs16902094 | 4 | 128406053 | 1.000.000 | 0.176517 | 1.27E−07 | 282 |
| rs377649 | rs16902094 | 1 | 128406423 | 1.000.000 | 0.155689 | 3.27E−07 | 283 |
| rs432470 | rs16902094 | 1 | 128408226 | 1.000.000 | 0.121951 | 3.71E−06 | 284 |
| rs424281 | rs16902094 | 4 | 128408608 | 1.000.000 | 0.121951 | 3.71E−06 | 285 |
| rs16902103 | rs16902094 | 2 | 128409556 | 0.938176 | 0.784640 | 1.19E−18 | 286 |
| rs16902104 | rs16902094 | 4 | 128410090 | 0.938176 | 0.784640 | 1.19E−18 | 287 |
| rs1668875 | rs16902094 | 2 | 128410285 | 0.884726 | 0.123979 | 0.000022 | 288 |
| rs7002712 | rs16902094 | 1 | 128410794 | 1.000.000 | 0.113456 | 7.10E−06 | 289 |
| rs587948 | rs16902094 | 1 | 128410862 | 0.869693 | 0.115901 | 0.000122 | 290 |
| rs623401 | rs16902094 | 3 | 128410909 | 0.882468 | 0.119243 | 0.000031 | 291 |
| rs16902118 | rs16902094 | 3 | 128417799 | 0.755579 | 0.539596 | 1.61E−12 | 292 |
| rs10095860 | rs16902094 | 2 | 128423967 | 0.755926 | 0.210795 | 3.49E−06 | 293 |
| rs16902121 | rs16902094 | 1 | 128424100 | 0.692044 | 0.452952 | 2.01E−10 | 294 |
| rs13256275 | rs16902094 | 1 | 128425408 | 0.856377 | 0.100507 | 0.000668 | 295 |
| rs11785277 | rs16902094 | 2 | 128434265 | 0.692044 | 0.452952 | 2.01E−10 | 296 |
| rs11774827 | rs16902094 | 2 | 128434523 | 0.696446 | 0.485008 | 3.83E−11 | 297 |
| rs11782693 | rs16902094 | 3 | 128435626 | 0.692044 | 0.452952 | 2.01E−10 | 298 |
| rs11782700 | rs16902094 | 4 | 128435678 | 0.676666 | 0.440592 | 1.15E−08 | 299 |
| rs11782735 | rs16902094 | 4 | 128435786 | 0.692044 | 0.452952 | 2.01E−10 | 300 |
| rs11783559 | rs16902094 | 4 | 128436107 | 0.692044 | 0.452952 | 2.01E−10 | 301 |
| rs11783615 | rs16902094 | 1 | 128436189 | 0.692044 | 0.452952 | 2.01E−10 | 302 |
| rs11784125 | rs16902094 | 3 | 128449102 | 0.692044 | 0.452952 | 2.01E−10 | 303 |
| rs11776260 | rs16902094 | 3 | 128451670 | 0.679839 | 0.452622 | 1.19E−09 | 304 |
| rs11774907 | rs16902094 | 2 | 128453272 | 0.635583 | 0.403965 | 1.53E−09 | 305 |
| rs16902127 | rs16902094 | 1 | 128453599 | 0.649091 | 0.410019 | 5.11E−09 | 306 |
| rs7015780 | rs16902094 | 2 | 128458689 | 1.000.000 | 0.105398 | 0.000013 | 307 |
| rs731900 | rs16902094 | 4 | 128459842 | 0.590039 | 0.230440 | 4.35E−06 | 308 |

TABLE 10
Surrogate markers (based on HapMap CEU sample set; http://www.hapmap.org) on
Chromosome 8q24.21 with r² > 0.1 to rs445114. Shown is; Surrogate marker name,
Anchor marker, the allele that is correlated with risk-allele of the anchor-marker, position
of the surrogate marker in NCBI Build 36, D′, r², and P-value of the correlation
between the markers. Allelic codes are A = 1, C = 2, G = 3, T = 4.

| | | | | | | | Seq |
|---|---|---|---|---|---|---|---|
| | Anchor | | Pos in NCBI | | | | ID |
| Marker | Marker | Allele | Build 36 | D′ | r2 | P-value | No: |
| rs13280181 | rs445114 | 1 | 128355698 | 0.756983 | 0.213711 | 4.00E−06 | 309 |
| rs12707923 | rs445114 | 2 | 128370181 | 0.841519 | 0.246916 | 2.52E−07 | 310 |
| rs6984900 | rs445114 | 4 | 128373451 | 0.841519 | 0.246916 | 2.52E−07 | 311 |
| rs17450865 | rs445114 | 4 | 128376979 | 0.917124 | 0.277119 | 1.15E−08 | 312 |
| rs7822551 | rs445114 | 3 | 128378370 | 1 | 0.307744 | 5.80E−11 | 313 |
| rs12549518 | rs445114 | 1 | 128378773 | 0.709214 | 0.208499 | 7.64E−07 | 314 |
| rs6996866 | rs445114 | 4 | 128379337 | 0.709214 | 0.208499 | 7.64E−07 | 315 |
| rs2007197 | rs445114 | 1 | 128380741 | 0.917124 | 0.277119 | 1.15E−08 | 316 |
| rs283727 | rs445114 | 3 | 128382542 | 0.942783 | 0.368446 | 2.13E−12 | 317 |
| rs283728 | rs445114 | 4 | 128382682 | 0.942783 | 0.368446 | 2.13E−12 | 318 |
| rs283704 | rs445114 | 4 | 128384764 | 1 | 0.372747 | 1.15E−14 | 319 |
| rs283705 | rs445114 | 2 | 128386632 | 0.833374 | 0.298101 | 1.36E−09 | 320 |
| rs10107982 | rs445114 | 4 | 128387937 | 1 | 0.639549 | 1.13E−21 | 321 |
| rs453875 | rs445114 | 2 | 128390593 | 1 | 0.760897 | 7.65E−27 | 322 |
| rs445114 | rs445114 | 4 | 128392363 | 1 | 1 | | 323 |
| rs11785664 | rs445114 | 2 | 128399606 | 1 | 0.346681 | 7.82E−14 | 324 |
| rs622556 | rs445114 | 1 | 128402379 | 1 | 0.475878 | 6.74E−18 | 325 |
| rs452529 | rs445114 | 2 | 128402441 | 1 | 0.475878 | 6.74E−18 | 326 |
| rs13256367 | rs445114 | 1 | 128404082 | 1 | 0.931187 | 1.81E−32 | 327 |
| rs10956356 | rs445114 | 3 | 128404148 | 1 | 0.470039 | 1.93E−17 | 328 |
| *rs10956358 | rs445114 | 1 | 128404428 | 0.837883 | 0.39021 | 2.25E−10 | 329 |
| *rs7008928 | rs445114 | 3 | 128404855 | 1 | 1 | 3.41E−36 | 330 |
| *rs7009077 | rs445114 | 3 | 128404978 | 1 | 1 | 3.51E−34 | 331 |
| rs400818 | rs445114 | 1 | 128405728 | 0.949942 | 0.444287 | 2.26E−14 | 332 |
| rs386883 | rs445114 | 2 | 128406053 | 0.944877 | 0.425146 | 6.48E−13 | 333 |
| rs377649 | rs445114 | 2 | 128406423 | 0.949942 | 0.444287 | 2.26E−14 | 334 |
| rs432470 | rs445114 | 3 | 128408226 | 0.940717 | 0.341857 | 1.49E−11 | 335 |
| rs424281 | rs445114 | 2 | 128408608 | 0.940717 | 0.341857 | 1.49E−11 | 336 |
| rs1668875 | rs445114 | 2 | 128410285 | 0.961538 | 0.7525 | 5.56E−24 | 337 |
| rs7002712 | rs445114 | 4 | 128410794 | 0.937625 | 0.31609 | 9.47E−11 | 338 |
| rs587948 | rs445114 | 1 | 128410862 | 0.922066 | 0.714523 | 3.25E−21 | 339 |
| rs623401 | rs445114 | 3 | 128410909 | 0.924009 | 0.718842 | 4.55E−22 | 340 |
| rs10956359 | rs445114 | 4 | 128411336 | 1 | 0.665653 | 2.16E−22 | 341 |
| rs17464492 | rs445114 | 1 | 128412048 | 1 | 0.639549 | 1.13E−21 | 342 |
| rs420101 | rs445114 | 2 | 128413061 | 0.768011 | 0.480074 | 2.36E−14 | 343 |
| rs7838714 | rs445114 | 2 | 128413130 | 0.805045 | 0.236747 | 1.21E−07 | 344 |
| rs389143 | rs445114 | 3 | 128413562 | 0.762967 | 0.458076 | 9.04E−14 | 345 |
| rs688201 | rs445114 | 2 | 128413584 | 0.762967 | 0.458076 | 9.04E−14 | 346 |
| rs687324 | rs445114 | 1 | 128413773 | 0.762967 | 0.458076 | 9.04E−14 | 347 |
| rs687279 | rs445114 | 3 | 128413806 | 0.554393 | 0.247752 | 1.12E−07 | 348 |
| rs436238 | rs445114 | 3 | 128414210 | 0.762967 | 0.458076 | 9.04E−14 | 349 |
| rs581761 | rs445114 | 2 | 128414413 | 0.758847 | 0.438162 | 3.35E−13 | 350 |
| rs673745 | rs445114 | 3 | 128414451 | 0.762967 | 0.458076 | 9.04E−14 | 351 |
| rs688937 | rs445114 | 1 | 128414563 | 0.762967 | 0.458076 | 9.04E−14 | 352 |
| rs672888 | rs445114 | 4 | 128414645 | 0.762967 | 0.458076 | 9.04E−14 | 353 |
| rs7826557 | rs445114 | 1 | 128414913 | 0.862746 | 0.249308 | 4.36E−08 | 354 |
| rs418269 | rs445114 | 2 | 128415540 | 0.762967 | 0.458076 | 9.04E−14 | 355 |
| rs385278 | rs445114 | 1 | 128416199 | 0.746378 | 0.43909 | 1.49E−12 | 356 |
| rs391640 | rs445114 | 4 | 128416306 | 0.86624 | 0.322364 | 5.88E−09 | 357 |
| rs670725 | rs445114 | 4 | 128416339 | 0.762967 | 0.458076 | 9.04E−14 | 358 |
| rs382824 | rs445114 | 1 | 128416906 | 0.762967 | 0.458076 | 9.04E−14 | 359 |
| rs383205 | rs445114 | 2 | 128417159 | 0.762967 | 0.458076 | 9.04E−14 | 360 |
| rs373616 | rs445114 | 1 | 128417244 | 0.762967 | 0.458076 | 9.04E−14 | 361 |
| rs13275275 | rs445114 | 1 | 128418909 | 0.749036 | 0.431322 | 2.57E−12 | 362 |
| rs13248140 | rs445114 | 3 | 128419070 | 0.762967 | 0.458076 | 9.04E−14 | 363 |
| rs10956361 | rs445114 | 3 | 128419288 | 0.794672 | 0.477399 | 2.50E−14 | 364 |
| rs10956362 | rs445114 | 1 | 128419568 | 0.762967 | 0.458076 | 9.04E−14 | 365 |
| rs13249993 | rs445114 | 3 | 128419697 | 0.814763 | 0.256442 | 3.32E−08 | 366 |
| rs11777532 | rs445114 | 2 | 128419790 | 1 | 0.309995 | 1.20E−12 | 367 |
| rs10956363 | rs445114 | 3 | 128420955 | 0.762967 | 0.458076 | 9.04E−14 | 368 |
| rs4871782 | rs445114 | 3 | 128421416 | 0.762967 | 0.458076 | 9.04E−14 | 369 |
| rs10087810 | rs445114 | 4 | 128421912 | 0.754583 | 0.418968 | 1.18E−12 | 370 |
| rs12541832 | rs445114 | 2 | 128422353 | 0.575952 | 0.287723 | 8.16E−09 | 371 |
| rs13262406 | rs445114 | 1 | 128422921 | 0.545729 | 0.262963 | 1.21E−07 | 372 |
| rs10098985 | rs445114 | 4 | 128424201 | 0.86648 | 0.260284 | 1.74E−08 | 373 |
| rs13281615 | rs445114 | 1 | 128424800 | 0.758847 | 0.438162 | 3.35E−13 | 374 |
| rs13256275 | rs445114 | 3 | 128425408 | 0.772686 | 0.269142 | 6.84E−08 | 375 |
| rs13267780 | rs445114 | 3 | 128426999 | 0.834516 | 0.376761 | 9.26E−11 | 376 |
| rs10447995 | rs445114 | 3 | 128427106 | 0.873822 | 0.284616 | 3.22E−09 | 377 |
| rs7014657 | rs445114 | 3 | 128430423 | 0.850316 | 0.25245 | 2.29E−07 | 378 |
| rs7002826 | rs445114 | 2 | 128433453 | 0.804201 | 0.232532 | 1.66E−07 | 379 |
| rs7007568 | rs445114 | 2 | 128434088 | 0.804201 | 0.232532 | 1.66E−07 | 380 |
| rs7842494 | rs445114 | 1 | 128435752 | 0.931014 | 0.279034 | 1.28E−09 | 381 |
| rs5022926 | rs445114 | 2 | 128436011 | 0.804201 | 0.232532 | 1.66E−07 | 382 |
| rs9693995 | rs445114 | 4 | 128437695 | 0.750165 | 0.400456 | 3.92E−12 | 383 |
| rs2121629 | rs445114 | 4 | 128442209 | 0.750165 | 0.400456 | 3.92E−12 | 384 |
| rs978683 | rs445114 | 2 | 128443299 | 0.70985 | 0.470079 | 8.52E−14 | 385 |
| rs9283954 | rs445114 | 4 | 128444552 | 1 | 0.309995 | 1.20E−12 | 386 |
| rs7831303 | rs445114 | 1 | 128445914 | 0.86648 | 0.260284 | 1.74E−08 | 387 |
| rs7815100 | rs445114 | 2 | 128445983 | 0.804201 | 0.232532 | 1.66E−07 | 388 |
| rs4143118 | rs445114 | 3 | 128446650 | 0.765791 | 0.429784 | 2.13E−11 | 389 |
| rs6988647 | rs445114 | 2 | 128446838 | 0.804201 | 0.232532 | 1.66E−07 | 390 |
| rs9693143 | rs445114 | 4 | 128447207 | 0.804201 | 0.232532 | 1.66E−07 | 391 |
| rs2060775 | rs445114 | 3 | 128447808 | 0.695208 | 0.239227 | 1.23E−06 | 392 |
| rs10956364 | rs445114 | 4 | 128448065 | 0.750165 | 0.400456 | 3.92E−12 | 393 |
| rs11776330 | rs445114 | 4 | 128448145 | 0.765884 | 0.416998 | 2.40E−11 | 394 |
| rs7845452 | rs445114 | 2 | 128448591 | 0.86648 | 0.260284 | 1.74E−08 | 395 |
| rs7815245 | rs445114 | 4 | 128452779 | 0.86648 | 0.260284 | 1.74E−08 | 396 |
| rs2121631 | rs445114 | 2 | 128455738 | 0.69495 | 0.29656 | 1.67E−08 | 397 |
| rs1562430 | rs445114 | 3 | 128457034 | 0.804201 | 0.232532 | 1.66E−07 | 398 |
| rs2392780 | rs445114 | 3 | 128457207 | 0.804201 | 0.232532 | 1.66E−07 | 399 |
| rs7015780 | rs445114 | 4 | 128458689 | 0.862481 | 0.24856 | 3.93E−08 | 400 |

*rs10956358 has alias: rs437980, rs7008928 has alias: rs620861, rs7009077 has alias: rs443053

TABLE 11
Surrogate markers (based on HapMap CEU sample set; http://www.hapmap.org) on
Chromosome 19q13.2 with r² > 0.1 to rs8102476. Shown is; Surrogate
marker name, Anchor marker, the allele that is correlated with risk-allele of the
anchor-marker, position of surrogate marker in NCBI Build 36, and D′, r2, and
P-value of the correlation between the markers. Allelic codes are A = 1, C =
2, G = 3, T = 4.

| | Anchor | | Pos in NCBI | | | | Seq |
|---|---|---|---|---|---|---|---|
| Marker | Marker | Allele | Build 36 | D′ | r2 | P-value | ID No: |
| rs8110367 | rs8102476 | 4 | 43170305 | 0.520759 | 0.130037 | 0.000500 | 401 |
| rs10500278 | rs8102476 | 3 | 43186344 | 0.520759 | 0.130037 | 0.000500 | 402 |
| rs705503 | rs8102476 | 3 | 43206158 | 0.446453 | 0.116540 | 0.000385 | 403 |
| rs1654338 | rs8102476 | 3 | 43228193 | 0.407931 | 0.121790 | 0.001349 | 404 |
| rs4803899 | rs8102476 | 1 | 43419480 | 0.954212 | 0.544559 | 2.20E−15 | 405 |
| rs1036233 | rs8102476 | 1 | 43420054 | 0.495700 | 0.214375 | 0.000014 | 406 |
| rs7246060 | rs8102476 | 3 | 43423502 | 0.550709 | 0.245840 | 2.43E−06 | 407 |
| rs8102476 | rs8102476 | 2 | 43426978 | 1 | 1 | 0 | 408 |
| rs12976534 | rs8102476 | 1 | 43435802 | 1.000.000 | 0.816572 | 1.25E−28 | 409 |
| rs4803934 | rs8102476 | 2 | 43438407 | 1.000.000 | 0.763477 | 4.61E−27 | 410 |
| rs11668070 | rs8102476 | 3 | 43440753 | 1.000.000 | 0.789581 | 1.14E−27 | 411 |
| rs7250689 | rs8102476 | 4 | 43445465 | 1.000.000 | 0.791045 | 2.98E−28 | 412 |
| rs7253245 | rs8102476 | 3 | 43445626 | 0.588838 | 0.139684 | 0.000170 | 413 |
| rs3786870 | rs8102476 | 2 | 43447704 | 0.588838 | 0.139684 | 0.000170 | 414 |
| rs3786872 | rs8102476 | 2 | 43447929 | 1.000.000 | 0.323671 | 5.74E−12 | 415 |
| rs3786877 | rs8102476 | 4 | 43451020 | 0.738167 | 0.471885 | 4.25E−13 | 416 |
| rs12610791 | rs8102476 | 4 | 43453003 | 1.000.000 | 0.153588 | 1.41E−06 | 417 |
| rs8101725 | rs8102476 | 2 | 43456912 | 0.733410 | 0.453316 | 1.17E−12 | 418 |
| rs870218 | rs8102476 | 3 | 43463015 | 0.852096 | 0.121227 | 0.000288 | 419 |
| rs12611009 | rs8102476 | 4 | 43464321 | 0.710742 | 0.426034 | 2.07E−10 | 420 |
| rs3826896 | rs8102476 | 4 | 43465362 | 0.733410 | 0.453316 | 1.17E−12 | 421 |
| rs8104823 | rs8102476 | 1 | 43470457 | 0.848201 | 0.123995 | 0.000466 | 422 |
| rs1821284 | rs8102476 | 2 | 43475421 | 0.574850 | 0.195351 | 0.000041 | 423 |
| rs4802327 | rs8102476 | 3 | 43485159 | 0.882262 | 0.162407 | 0.000032 | 424 |
| rs11672219 | rs8102476 | 3 | 43485436 | 0.882262 | 0.162407 | 0.000032 | 425 |
| rs3816044 | rs8102476 | 3 | 43486590 | 0.882262 | 0.162407 | 0.000032 | 426 |
| rs2304177 | rs8102476 | 3 | 43486999 | 0.877516 | 0.160665 | 0.000064 | 427 |
| rs4312417 | rs8102476 | 1 | 43489029 | 0.603523 | 0.161208 | 0.000170 | 428 |
| rs3178327 | rs8102476 | 1 | 43489926 | 0.602646 | 0.164369 | 0.000151 | 429 |
| rs3900981 | rs8102476 | 3 | 43492005 | 0.914878 | 0.250889 | 1.10E−07 | 430 |
| rs3843754 | rs8102476 | 3 | 43499024 | 0.610834 | 0.164292 | 0.000102 | 431 |
| rs2302182 | rs8102476 | 4 | 43519800 | 0.682463 | 0.110762 | 0.001143 | 432 |
| rs1052375 | rs8102476 | 1 | 43553173 | 0.550831 | 0.265280 | 2.09E−07 | 433 |
| rs12609246 | rs8102476 | 1 | 43601479 | 0.467823 | 0.118355 | 0.001120 | 434 |
| rs3745843 | rs8102476 | 3 | 43624960 | 1.000.000 | 0.153588 | 1.41E−06 | 435 |
| rs3745844 | rs8102476 | 3 | 43634088 | 1.000.000 | 0.180593 | 1.77E−07 | 436 |
| rs2304150 | rs8102476 | 3 | 43647423 | 0.324253 | 0.100289 | 0.002002 | 437 |

### Example 2

[0320] Marker rs620861, which is an alias for marker rs7008928, is a surrogate of marker rs445114 (r²=1; Table 10). Investigation of the association of this marker to prostate cancer reveals the following result:

TABLE 12
Association results for rs620861 [G] on 8q24.

| Study | Cases | Controls | Frequency | | | |
|---|---|---|---|---|---|---|
| population | (N) | (N) | Cases | Controls | OR | P-value |
| Iceland^{a} | 1,849 | 35,327 | 0.710 | 0.670 | 1.20 | 6.7E−07 |

[0321] In a similar manner, marker rs16902104 is an excellent surrogate for rs16902094 (OR=1.36; P-value 2.32E-10).

[0322] The association of surrogate markers was further investigated by imputing markers in the HapMap collection into the Icelandic population. This was done using the IMPUTE software (Marchini, J. et al. Nat Genet 39:906-13 (2007)) and the HapMap (NCBI Build 36 (db126b)) CEU data as reference (Frazer, K. A., et al. Nature 449:851-61 (2007)).

[0323] Results of this analysis is shown in the Tables 13-16 below. The association signal for the different surrogate markers is different. This is due to the different degree of linkage disequilibrium between the markers and the anchor marker. Further, since the data shown in Tables 13-16 is based on Icelandic data only (1776 cases and 35675 controls), the association signal is not as strong as it would be for a larger dataset. This leads to a reduced power to detect the association signal associated with each locus.

TABLE 13
Association of surrogate markers of rs10934853 on Chromosome 3q21.3 with Prostate
Cancer. Results are shown for imputed Icelandic data set. Shown is the marker name and position in
NCBI Build 36, the risk allele and its population frequency, number of cases and controls, the Odds
ratio, and P values. Allelic codes are A = 1, C = 2, G = 3 and T = 4.

| | Pos NCBI | Risk | | No of | No of | | | Seq Id |
|---|---|---|---|---|---|---|---|---|
| Marker | B36 | Allele | Freq. | cases | controls | OR | P-Value | NO |
| rs16845806 | 129193164 | A | 0.190533 | 1776 | 35675 | 1.11236 | 0.0265212 | 21 |
| rs7630727 | 129196138 | C | 0.458237 | 1776 | 35675 | 1.10577 | 0.00568714 | 22 |
| rs1549876 | 129197301 | G | 0.468457 | 1776 | 35675 | 1.10543 | 0.00613608 | 23 |
| rs17282209 | 129197886 | C | 0.094161 | 1776 | 35675 | 1.08949 | 0.147235 | 24 |
| rs6439104 | 129200392 | C | 0.187097 | 1776 | 35675 | 1.10633 | 0.0240607 | 25 |
| rs1469659 | 129203430 | T | 0.1871 | 1776 | 35675 | 1.10614 | 0.0242733 | 26 |
| rs7611430 | 129205905 | G | 0.45749 | 1776 | 35675 | 1.10462 | 0.00591018 | 27 |
| rs6770337 | 129207423 | G | 0.457343 | 1776 | 35675 | 1.10449 | 0.00591256 | 28 |
| rs6777095 | 129209327 | A | 0.165982 | 1776 | 35675 | 1.12338 | 0.0114255 | 29 |
| rs4602341 | 129215781 | A | 0.180587 | 1776 | 35675 | 1.10778 | 0.0196696 | 30 |
| rs4857833 | 129228387 | G | 0.420264 | 1776 | 35675 | 1.0996 | 0.00607082 | 31 |
| rs6439108 | 129228455 | G | 0.420264 | 1776 | 35675 | 1.0996 | 0.00607082 | 32 |
| rs6764517 | 129230531 | A | 0.180953 | 1776 | 35675 | 1.10749 | 0.0192157 | 33 |
| rs981447 | 129236378 | G | 0.420264 | 1776 | 35675 | 1.0996 | 0.00607082 | 34 |
| rs981446 | 129236420 | G | 0.420052 | 1772 | 35471 | 1.09835 | 0.00665709 | 35 |
| rs1469658 | 129241904 | T | 0.180953 | 1776 | 35675 | 1.1075 | 0.0192157 | 36 |
| rs2335772 | 129255226 | G | 0.537872 | 1776 | 35675 | 1.08136 | 0.0244486 | 37 |
| rs1030656 | 129256317 | G | 0.420264 | 1776 | 35675 | 1.09961 | 0.00607052 | 38 |
| rs1030655 | 129256366 | T | 0.420264 | 1776 | 35675 | 1.09961 | 0.00607052 | 39 |
| rs2335771 | 129262634 | A | 0.420264 | 1776 | 35675 | 1.09961 | 0.00607054 | 40 |
| rs759945 | 129262772 | G | 0.201428 | 1776 | 35675 | 1.10093 | 0.0257225 | 41 |
| rs2075402 | 129266952 | C | 0.420264 | 1776 | 35675 | 1.09961 | 0.00607046 | 42 |
| rs1554534 | 129282359 | G | 0.180952 | 1776 | 35675 | 1.1075 | 0.0192103 | 43 |
| rs3732402 | 129288908 | G | 0.42132 | 1776 | 35675 | 1.09705 | 0.00801588 | 44 |
| rs13091198 | 129294727 | T | 0.114425 | 1776 | 35675 | 1.07487 | 0.200426 | 45 |
| rs11714052 | 129297147 | A | 0.093033 | 1776 | 35675 | 1.06895 | 0.251576 | 46 |
| rs6439113 | 129299262 | A | 0.179852 | 1776 | 35675 | 1.11915 | 0.0102817 | 47 |
| rs6787614 | 129300168 | A | 0.105028 | 1776 | 35675 | 1.05445 | 0.349432 | 48 |
| rs11720239 | 129300645 | G | 0.092843 | 1776 | 35669 | 1.06769 | 0.259935 | 49 |
| rs11715661 | 129303536 | T | 0.092807 | 1776 | 35675 | 1.06771 | 0.260031 | 50 |
| rs7641133 | 129305010 | T | 0.272084 | 1776 | 35675 | 1.12241 | 0.00240999 | 51 |
| rs11924142 | 129309308 | C | 0.179295 | 1776 | 35675 | 1.12332 | 0.00795035 | 52 |
| rs7650365 | 129316693 | G | 0.543571 | 1776 | 35669 | 1.07651 | 0.0322924 | 53 |
| rs6788879 | 129318319 | A | 0.179295 | 1776 | 35675 | 1.1233 | 0.00796165 | 54 |
| rs6439115 | 129318493 | C | 0.179295 | 1776 | 35675 | 1.1233 | 0.00796223 | 55 |
| rs4857836 | 129318977 | C | 0.272082 | 1776 | 35675 | 1.1224 | 0.00241319 | 56 |
| rs4857837 | 129319009 | A | 0.272082 | 1776 | 35675 | 1.1224 | 0.00241279 | 57 |
| rs11707462 | 129321320 | C | 0.092773 | 1776 | 35675 | 1.06772 | 0.260089 | 58 |
| rs9821568 | 129321689 | G | 0.179296 | 1776 | 35675 | 1.12332 | 0.00795594 | 59 |
| rs6784159 | 129326068 | C | 0.092757 | 1776 | 35675 | 1.06775 | 0.260055 | 60 |
| rs2811475 | 129328391 | C | 0.179299 | 1776 | 35675 | 1.12333 | 0.00794779 | 61 |
| rs13095660 | 129330846 | T | 0.092736 | 1776 | 35675 | 1.06789 | 0.259105 | 62 |
| rs6439116 | 129331757 | C | 0.092735 | 1776 | 35675 | 1.06791 | 0.259033 | 63 |
| rs6414310 | 129339263 | T | 0.272041 | 1776 | 35675 | 1.12247 | 0.00240394 | 64 |
| rs2955102 | 129348200 | G | 0.272018 | 1776 | 35675 | 1.12254 | 0.00239438 | 65 |
| rs11920225 | 129354865 | G | 0.179325 | 1776 | 35675 | 1.12335 | 0.0079397 | 66 |
| rs11709066 | 129357602 | A | 0.092687 | 1776 | 35675 | 1.06791 | 0.259254 | 67 |
| rs11716941 | 129358064 | G | 0.092686 | 1776 | 35675 | 1.06792 | 0.259182 | 68 |
| rs2811472 | 129361561 | G | 0.179328 | 1776 | 35675 | 1.12333 | 0.00794914 | 69 |
| rs13077790 | 129365348 | T | 0.092676 | 1776 | 35675 | 1.06795 | 0.258994 | 71 |
| rs2811473 | 129367627 | C | 0.17933 | 1776 | 35675 | 1.12335 | 0.00793777 | 72 |
| rs2687728 | 129367698 | A | 0.17933 | 1776 | 35675 | 1.12335 | 0.00793829 | 73 |
| rs10934850 | 129369647 | A | 0.092662 | 1776 | 35675 | 1.06786 | 0.259716 | 74 |
| rs872267 | 129370757 | A | 0.272001 | 1776 | 35675 | 1.12253 | 0.00239846 | 75 |
| rs2687731 | 129371384 | T | 0.179331 | 1776 | 35675 | 1.12339 | 0.00792095 | 76 |
| rs3122174 | 129372065 | G | 0.179331 | 1776 | 35675 | 1.12338 | 0.00792176 | 77 |
| rs2999051 | 129372094 | C | 0.392831 | 1776 | 35675 | 1.09533 | 0.00969242 | 78 |
| rs13067650 | 129372232 | A | 0.092649 | 1776 | 35675 | 1.06794 | 0.259221 | 79 |
| rs2248668 | 129373439 | G | 0.185243 | 1776 | 35675 | 1.10942 | 0.0177349 | 80 |
| rs2955121 | 129374086 | G | 0.179333 | 1776 | 35675 | 1.1234 | 0.00791357 | 81 |
| rs11706455 | 129374681 | A | 0.092643 | 1776 | 35675 | 1.06796 | 0.259105 | 82 |
| rs2999052 | 129374727 | C | 0.271983 | 1776 | 35675 | 1.12258 | 0.00239178 | 83 |
| rs11715394 | 129376254 | T | 0.092642 | 1776 | 35675 | 1.06797 | 0.259081 | 84 |
| rs2687729 | 129377916 | G | 0.271979 | 1776 | 35675 | 1.12259 | 0.00238993 | 85 |
| rs2999060 | 129383184 | G | 0.179337 | 1776 | 35675 | 1.12332 | 0.00795103 | 87 |
| rs2999056 | 129386212 | A | 0.179337 | 1776 | 35675 | 1.12333 | 0.00795023 | 88 |
| rs2955123 | 129386368 | C | 0.18846 | 1776 | 35675 | 1.13241 | 0.00465959 | 89 |
| rs2811517 | 129386880 | C | 0.179337 | 1776 | 35675 | 1.12333 | 0.00795015 | 90 |
| rs2811516 | 129388141 | G | 0.285558 | 1776 | 35675 | 1.11547 | 0.00679751 | 91 |
| rs2811515 | 129388208 | A | 0.268018 | 1776 | 35675 | 1.12272 | 0.0023819 | 92 |
| rs2811514 | 129390619 | G | 0.267965 | 1776 | 35675 | 1.1227 | 0.00238181 | 93 |
| rs2811512 | 129394510 | A | 0.267936 | 1776 | 35675 | 1.12263 | 0.00239317 | 94 |
| rs2811511 | 129395678 | A | 0.08737 | 1776 | 35675 | 1.06843 | 0.267016 | 95 |
| rs883238 | 129395953 | G | 0.267937 | 1776 | 35675 | 1.12262 | 0.00239446 | 96 |
| rs940061 | 129396404 | G | 0.180558 | 1776 | 35675 | 1.12308 | 0.00762893 | 97 |
| rs2811510 | 129397202 | G | 0.180558 | 1776 | 35675 | 1.12308 | 0.00762893 | 98 |
| rs2811483 | 129397363 | C | 0.180558 | 1776 | 35675 | 1.12309 | 0.00762893 | 99 |
| rs2811484 | 129397543 | A | 0.180558 | 1776 | 35675 | 1.12309 | 0.00762893 | 100 |
| rs2687730 | 129398147 | T | 0.08737 | 1776 | 35675 | 1.06843 | 0.267016 | 101 |
| rs2811509 | 129399241 | A | 0.267937 | 1776 | 35675 | 1.12262 | 0.00239447 | 102 |
| rs2492285 | 129400690 | A | 0.267936 | 1776 | 35675 | 1.12262 | 0.00239433 | 103 |
| rs2687720 | 129401645 | T | 0.267936 | 1776 | 35675 | 1.12262 | 0.00239433 | 104 |
| rs2811508 | 129402713 | C | 0.267937 | 1776 | 35675 | 1.12262 | 0.00239465 | 105 |
| rs2811486 | 129402765 | G | 0.08737 | 1776 | 35675 | 1.06843 | 0.267016 | 106 |
| rs6439119 | 129405877 | T | 0.267937 | 1776 | 35675 | 1.12262 | 0.00239465 | 107 |
| rs2955125 | 129407882 | G | 0.180558 | 1776 | 35675 | 1.12308 | 0.00763054 | 108 |
| rs2955126 | 129408944 | A | 0.08932 | 1776 | 35675 | 1.08166 | 0.189446 | 109 |
| rs2955127 | 129409206 | G | 0.180558 | 1776 | 35675 | 1.12308 | 0.00763055 | 110 |
| rs2955129 | 129411897 | T | 0.08737 | 1776 | 35675 | 1.06843 | 0.267016 | 112 |
| rs7374072 | 129413556 | C | 0.267937 | 1776 | 35675 | 1.12261 | 0.0023954 | 113 |
| rs2999090 | 129414030 | G | 0.08737 | 1776 | 35675 | 1.06843 | 0.267016 | 114 |
| rs7372439 | 129414092 | A | 0.267937 | 1776 | 35675 | 1.12261 | 0.0023954 | 115 |
| rs4857871 | 129416476 | C | 0.267937 | 1776 | 35675 | 1.12261 | 0.0023954 | 116 |
| rs4857872 | 129416512 | T | 0.267937 | 1776 | 35675 | 1.12261 | 0.0023954 | 117 |
| rs4857873 | 129416908 | A | 0.267937 | 1776 | 35675 | 1.12261 | 0.0023954 | 118 |
| rs6770140 | 129417019 | T | 0.267937 | 1776 | 35675 | 1.12261 | 0.0023954 | 119 |
| rs4384971 | 129417464 | C | 0.267937 | 1776 | 35675 | 1.12261 | 0.0023954 | 120 |
| rs2999089 | 129417849 | C | 0.08737 | 1776 | 35675 | 1.06843 | 0.267016 | 121 |
| rs6439121 | 129418151 | G | 0.268537 | 1776 | 35675 | 1.12113 | 0.00270169 | 122 |
| rs2254379 | 129420016 | C | 0.180443 | 1773 | 35657 | 1.12021 | 0.00918407 | 123 |
| rs2955130 | 129420504 | G | 0.08737 | 1776 | 35675 | 1.06843 | 0.267003 | 124 |
| rs9814834 | 129420827 | G | 0.267938 | 1776 | 35675 | 1.12261 | 0.00239555 | 125 |
| rs2955132 | 129422916 | C | 0.180559 | 1776 | 35675 | 1.12307 | 0.00763298 | 126 |
| rs9845651 | 129423043 | T | 0.267938 | 1776 | 35675 | 1.12261 | 0.00239583 | 127 |
| rs6439122 | 129423224 | A | 0.267938 | 1776 | 35675 | 1.12261 | 0.00239583 | 128 |
| rs9873786 | 129425069 | A | 0.267938 | 1776 | 35675 | 1.12261 | 0.00239597 | 129 |
| rs4857838 | 129426018 | A | 0.267938 | 1776 | 35675 | 1.12261 | 0.00239597 | 130 |
| rs6775988 | 129427167 | C | 0.267938 | 1776 | 35675 | 1.12261 | 0.00239598 | 131 |
| rs9830294 | 129429478 | G | 0.267938 | 1776 | 35675 | 1.12261 | 0.00239598 | 132 |
| rs4857877 | 129430750 | A | 0.267938 | 1776 | 35675 | 1.12261 | 0.00239598 | 133 |
| rs2999086 | 129433938 | C | 0.087366 | 1776 | 35675 | 1.06842 | 0.267076 | 134 |
| rs2999085 | 129434249 | G | 0.087366 | 1776 | 35675 | 1.06842 | 0.267063 | 135 |
| rs2999084 | 129435178 | A | 0.087365 | 1776 | 35675 | 1.06843 | 0.267039 | 136 |
| rs2999083 | 129437124 | C | 0.087365 | 1776 | 35675 | 1.06843 | 0.267023 | 137 |
| rs2999081 | 129438962 | A | 0.077497 | 1776 | 35675 | 1.07185 | 0.295545 | 138 |
| rs2999079 | 129439922 | T | 0.087363 | 1776 | 35675 | 1.06846 | 0.266852 | 139 |
| rs4074440 | 129440703 | G | 0.267938 | 1776 | 35675 | 1.12261 | 0.00239596 | 140 |
| rs9843281 | 129444086 | A | 0.267938 | 1776 | 35675 | 1.12261 | 0.00239611 | 142 |
| rs2999073 | 129445019 | G | 0.087359 | 1776 | 35675 | 1.06852 | 0.266459 | 143 |
| rs2955085 | 129445447 | G | 0.087359 | 1776 | 35675 | 1.06852 | 0.266433 | 144 |
| rs2999072 | 129445566 | G | 0.087359 | 1776 | 35675 | 1.06852 | 0.266433 | 145 |
| rs13434079 | 129446138 | A | 0.267938 | 1776 | 35675 | 1.12261 | 0.00239625 | 146 |
| rs2955088 | 129446400 | C | 0.087358 | 1776 | 35675 | 1.06853 | 0.266368 | 147 |
| rs2999070 | 129447341 | G | 0.087358 | 1776 | 35675 | 1.06854 | 0.266317 | 148 |
| rs17343355 | 129449481 | C | 0.541248 | 1776 | 35675 | 1.07647 | 0.0322715 | 149 |
| rs2955090 | 129452061 | T | 0.087357 | 1776 | 35675 | 1.06852 | 0.266496 | 150 |
| rs2955091 | 129454051 | G | 0.087357 | 1776 | 35675 | 1.06852 | 0.266485 | 151 |
| rs2999069 | 129454299 | C | 0.087357 | 1776 | 35675 | 1.06852 | 0.266485 | 152 |
| rs2955092 | 129455218 | C | 0.087357 | 1776 | 35675 | 1.06852 | 0.266473 | 153 |
| rs2955094 | 129459613 | A | 0.087356 | 1776 | 35675 | 1.06853 | 0.266409 | 154 |
| rs2955095 | 129460355 | A | 0.087356 | 1776 | 35675 | 1.06853 | 0.266413 | 155 |
| rs2955096 | 129460556 | A | 0.087356 | 1776 | 35675 | 1.06853 | 0.266401 | 156 |
| rs2999068 | 129460668 | T | 0.087356 | 1776 | 35675 | 1.06853 | 0.266401 | 157 |
| rs2999067 | 129461221 | C | 0.087356 | 1776 | 35675 | 1.06853 | 0.266387 | 158 |
| rs2955099 | 129462344 | G | 0.087356 | 1776 | 35675 | 1.06853 | 0.266374 | 159 |
| rs2999066 | 129462976 | T | 0.087356 | 1776 | 35675 | 1.06853 | 0.266373 | 160 |
| rs2999065 | 129464128 | A | 0.087356 | 1776 | 35675 | 1.06854 | 0.266373 | 161 |
| rs2811545 | 129465838 | C | 0.087356 | 1776 | 35675 | 1.06854 | 0.266372 | 162 |
| rs2999035 | 129465899 | T | 0.163903 | 1776 | 35675 | 1.13152 | 0.00788934 | 163 |
| rs2811544 | 129466185 | T | 0.087356 | 1776 | 35675 | 1.06853 | 0.266372 | 164 |
| rs2811543 | 129466486 | T | 0.087356 | 1776 | 35675 | 1.06853 | 0.266371 | 165 |
| rs2811541 | 129467484 | C | 0.087356 | 1776 | 35675 | 1.06853 | 0.266358 | 166 |
| rs2811540 | 129468259 | T | 0.08477 | 1776 | 35675 | 1.07382 | 0.245707 | 167 |
| rs2811539 | 129469163 | C | 0.08477 | 1776 | 35675 | 1.07383 | 0.245672 | 168 |
| rs2811538 | 129469321 | A | 0.087355 | 1776 | 35675 | 1.06854 | 0.266325 | 169 |
| rs2811396 | 129470046 | A | 0.087355 | 1776 | 35675 | 1.06854 | 0.266313 | 170 |
| rs2811400 | 129470557 | G | 0.087354 | 1776 | 35675 | 1.06851 | 0.266514 | 171 |
| rs2811537 | 129470614 | A | 0.087354 | 1776 | 35675 | 1.06851 | 0.266514 | 172 |
| rs2999064 | 129470930 | G | 0.188851 | 1776 | 35675 | 1.11749 | 0.0130514 | 173 |
| rs2811536 | 129471609 | A | 0.087354 | 1776 | 35675 | 1.06852 | 0.266466 | 174 |
| rs2811534 | 129473798 | A | 0.084769 | 1776 | 35675 | 1.07381 | 0.245772 | 175 |
| rs2811413 | 129473839 | C | 0.321814 | 1776 | 35675 | 1.1015 | 0.00959693 | 176 |
| rs2811415 | 129474217 | A | 0.141246 | 1776 | 35675 | 1.02292 | 0.66147 | 177 |
| rs2811533 | 129474419 | G | 0.087354 | 1776 | 35675 | 1.06853 | 0.266438 | 178 |
| rs2811416 | 129474628 | T | 0.087354 | 1776 | 35675 | 1.06853 | 0.266436 | 179 |
| rs2811532 | 129474860 | G | 0.087353 | 1776 | 35675 | 1.06853 | 0.266411 | 180 |
| rs2811531 | 129475185 | G | 0.087353 | 1776 | 35675 | 1.06853 | 0.266411 | 181 |
| rs2955100 | 129476015 | G | 0.087353 | 1776 | 35675 | 1.06853 | 0.266374 | 182 |
| rs2999061 | 129476313 | A | 0.087353 | 1776 | 35675 | 1.06853 | 0.266373 | 183 |
| rs2811529 | 129476850 | G | 0.267938 | 1776 | 35675 | 1.12261 | 0.00239619 | 184 |
| rs2811527 | 129477294 | A | 0.087353 | 1776 | 35675 | 1.06854 | 0.266361 | 185 |
| rs2811373 | 129480119 | T | 0.087352 | 1776 | 35675 | 1.06851 | 0.266548 | 186 |
| rs2811525 | 129482120 | T | 0.087352 | 1776 | 35675 | 1.06851 | 0.266535 | 187 |
| rs7374952 | 129484057 | T | 0.087352 | 1776 | 35675 | 1.06851 | 0.266511 | 188 |
| rs7374227 | 129484205 | G | 0.087352 | 1776 | 35675 | 1.06851 | 0.266511 | 189 |
| rs4593050 | 129487221 | T | 0.087351 | 1776 | 35675 | 1.06853 | 0.266462 | 190 |
| rs6439124 | 129490156 | A | 0.087351 | 1776 | 35675 | 1.06853 | 0.266396 | 191 |
| rs7373998 | 129490913 | A | 0.08735 | 1776 | 35675 | 1.06854 | 0.26637 | 192 |
| rs2955101 | 129492302 | A | 0.08735 | 1776 | 35675 | 1.06854 | 0.266357 | 193 |
| rs2811519 | 129495566 | T | 0.08735 | 1776 | 35675 | 1.06855 | 0.266318 | 194 |
| rs2811518 | 129496335 | G | 0.087191 | 1775 | 35620 | 1.06847 | 0.266718 | 195 |
| rs2955103 | 129497926 | C | 0.389385 | 1776 | 35675 | 1.09627 | 0.00862498 | 196 |
| rs2811388 | 129501137 | A | 0.083826 | 1771 | 35622 | 1.07352 | 0.242449 | 197 |
| rs2999036 | 129503391 | G | 0.086605 | 1776 | 35675 | 1.07312 | 0.239556 | 198 |
| rs2811390 | 129504171 | T | 0.086605 | 1776 | 35675 | 1.07312 | 0.239556 | 199 |
| rs2811391 | 129505058 | A | 0.086605 | 1776 | 35675 | 1.07312 | 0.239545 | 200 |
| rs2811393 | 129506689 | T | 0.086604 | 1776 | 35675 | 1.07312 | 0.239522 | 201 |
| rs2037965 | 129507734 | C | 0.086604 | 1776 | 35675 | 1.07312 | 0.239496 | 202 |
| rs2811397 | 129509927 | C | 0.087751 | 1776 | 35675 | 1.07387 | 0.233841 | 203 |
| rs6805582 | 129511698 | A | 0.086604 | 1776 | 35675 | 1.07313 | 0.239481 | 204 |
| rs6805621 | 129511894 | T | 0.086604 | 1776 | 35675 | 1.07313 | 0.239481 | 205 |
| rs6794591 | 129513909 | T | 0.086603 | 1776 | 35675 | 1.07313 | 0.239431 | 206 |
| rs16843876 | 129515230 | G | 0.086603 | 1776 | 35675 | 1.07314 | 0.239422 | 207 |
| rs11706852 | 129515577 | A | 0.086603 | 1776 | 35675 | 1.07314 | 0.239422 | 208 |
| rs11706826 | 129515681 | T | 0.086603 | 1776 | 35675 | 1.07314 | 0.239419 | 209 |
| rs11706908 | 129515738 | A | 0.086603 | 1776 | 35675 | 1.07314 | 0.239415 | 210 |
| rs6771646 | 129517225 | G | 0.086602 | 1776 | 35675 | 1.07315 | 0.239327 | 211 |
| rs13095166 | 129519476 | T | 0.184693 | 1776 | 35675 | 1.10785 | 0.0179989 | 212 |
| rs12486127 | 129521379 | A | 0.18472 | 1776 | 35675 | 1.10776 | 0.0180714 | 214 |
| rs12486156 | 129521524 | T | 0.18472 | 1776 | 35675 | 1.10776 | 0.0180749 | 215 |
| rs6772407 | 129527062 | T | 0.084347 | 1776 | 35675 | 1.08604 | 0.170941 | 217 |
| rs4857841 | 129529333 | A | 0.269072 | 1776 | 35675 | 1.11837 | 0.00330785 | 218 |
| rs11710704 | 129529926 | A | 0.084347 | 1776 | 35675 | 1.08603 | 0.170941 | 219 |
| rs16844002 | 129536177 | T | 0.084347 | 1776 | 35675 | 1.08604 | 0.170941 | 220 |
| rs6798749 | 129539587 | A | 0.084122 | 1774 | 35654 | 1.08273 | 0.18854 | 221 |
| rs1735558 | 129542300 | A | 0.184306 | 1775 | 35660 | 1.11133 | 0.0147986 | 222 |
| rs4857879 | 129546808 | C | 0.184722 | 1776 | 35675 | 1.10776 | 0.0180674 | 223 |
| rs11721213 | 129550131 | T | 0.08435 | 1776 | 35675 | 1.08598 | 0.171185 | 224 |
| rs1735549 | 129554499 | T | 0.241217 | 1776 | 35675 | 1.12366 | 0.00333846 | 225 |
| rs1735546 | 129558088 | G | 0.249115 | 1776 | 35675 | 1.12305 | 0.00316979 | 226 |
| rs12632366 | 129560248 | G | 0.557623 | 1776 | 35675 | 1.06225 | 0.0815991 | 227 |
| rs1735545 | 129563950 | C | 0.241369 | 1776 | 35675 | 1.12191 | 0.00367153 | 228 |
| rs1702122 | 129566022 | G | 0.249153 | 1776 | 35675 | 1.11859 | 0.00437024 | 229 |
| rs1108313 | 129567780 | G | 0.556413 | 1776 | 35671 | 1.05719 | 0.10755 | 230 |
| rs1735538 | 129574792 | G | 0.267842 | 1776 | 35675 | 1.10809 | 0.00899775 | 231 |
| rs1702119 | 129577183 | C | 0.24994 | 1776 | 35675 | 1.11533 | 0.00529074 | 232 |
| rs1702118 | 129577968 | G | 0.168305 | 1776 | 35675 | 1.10834 | 0.0223525 | 233 |
| rs3021461 | 129578342 | C | 0.240891 | 1774 | 35660 | 1.11479 | 0.00585462 | 234 |
| rs2977565 | 129578457 | A | 0.239959 | 1776 | 35675 | 1.11772 | 0.00491973 | 235 |
| rs2293947 | 129580186 | C | 0.071154 | 1771 | 35627 | 1.08951 | 0.188219 | 236 |
| rs741925 | 129592606 | T | 0.160768 | 1776 | 35675 | 1.11178 | 0.0206329 | 237 |
| rs729847 | 129593460 | A | 0.247283 | 1776 | 35675 | 1.12289 | 0.0033416 | 238 |
| rs1702134 | 129593891 | T | 0.169509 | 1776 | 35675 | 1.11456 | 0.0180199 | 239 |
| rs1620440 | 129594997 | C | 0.159376 | 1776 | 35667 | 1.11124 | 0.0210842 | 240 |
| rs7632169 | 129597277 | C | 0.257379 | 1776 | 35675 | 1.11997 | 0.00375256 | 241 |
| rs1735527 | 129598071 | G | 0.159639 | 1776 | 35675 | 1.11269 | 0.0202305 | 242 |
| rs760383 | 129602255 | G | 0.248549 | 1776 | 35675 | 1.12069 | 0.00393357 | 243 |
| rs6780368 | 129604729 | T | 0.159773 | 1776 | 35675 | 1.11388 | 0.0193951 | 247 |
| rs2659685 | 129605086 | A | 0.256975 | 1776 | 35675 | 1.11975 | 0.00382081 | 248 |
| rs1735537 | 129605510 | C | 0.256501 | 1770 | 35645 | 1.11369 | 0.00551919 | 250 |
| rs2977564 | 129606476 | G | 0.597592 | 1776 | 35675 | 1.07805 | 0.0401501 | 252 |

TABLE 14
Association of surrogate markers of rs445114 on Chromosome 8q24.21 with Prostate
Cancer. Results are shown for imputed Icelandic data set. Shown is the marker name and position in
NCBI Build 36, the risk allele and it's frequency in the population, number of cases and controls, the
Odds ratio, and P values. Allelic codes are A = 1, C = 2, G = 3 and T = 4.

| | Pos NCBI | Risk | | No of | No of | | | Seq Id |
|---|---|---|---|---|---|---|---|---|
| Marker | B36 | Allele | Freq. | cases | controls | OR | P-Value | NO |
| rs453875 | 128390593 | G | 0.604809 | 1776 | 35675 | 1.19943 | 6.12E−07 | 276 |
| rs10107982 | 128387937 | T | 0.744662 | 1776 | 35675 | 1.22938 | 9.25E−07 | 321 |
| rs13256367 | 128404082 | A | 0.696145 | 1776 | 35675 | 1.20773 | 1.20E−06 | 327 |
| rs1668875 | 128410285 | G | 0.635214 | 1776 | 35675 | 1.1798 | 7.14E−06 | 288 |
| rs587948 | 128410862 | T | 0.636052 | 1776 | 35675 | 1.17937 | 7.49E−06 | 290 |
| rs623401 | 128410909 | C | 0.636033 | 1776 | 35675 | 1.17934 | 7.50E−06 | 291 |
| rs10956359 | 128411336 | T | 0.735687 | 1776 | 35675 | 1.19668 | 8.95E−06 | 341 |
| rs17464492 | 128412048 | A | 0.735493 | 1774 | 35656 | 1.18924 | 1.51E−05 | 342 |
| rs7822551 | 128378370 | G | 0.862764 | 1776 | 35675 | 1.21895 | 0.0002054 | 313 |
| rs17450865 | 128376979 | T | 0.859502 | 1776 | 35675 | 1.21444 | 0.000228732 | 312 |
| rs2007197 | 128380741 | T | 0.860989 | 1776 | 35642 | 1.20942 | 0.000257467 | 316 |
| rs6984900 | 128373451 | T | 0.81559 | 1775 | 35563 | 1.17716 | 0.000381047 | 311 |
| rs12707923 | 128370181 | C | 0.815108 | 1776 | 35675 | 1.17284 | 0.000520043 | 310 |
| rs13280181 | 128355698 | A | 0.811443 | 1776 | 35675 | 1.15179 | 0.00214344 | 309 |
| rs13262081 | 128353948 | G | 0.811649 | 1776 | 35675 | 1.15123 | 0.00232655 | 883 |
| rs391640 | 128416306 | A | 0.814053 | 1776 | 35675 | 1.13303 | 0.00641126 | 357 |
| rs13267780 | 128426999 | G | 0.786019 | 1776 | 35675 | 1.12409 | 0.00701101 | 376 |
| rs581761 | 128414413 | G | 0.642578 | 1776 | 35675 | 1.05484 | 0.144439 | 350 |
| rs389143 | 128413562 | C | 0.649348 | 1776 | 35675 | 1.05037 | 0.176442 | 345 |
| rs688201 | 128413584 | G | 0.649348 | 1776 | 35675 | 1.05037 | 0.176442 | 346 |
| rs687324 | 128413773 | T | 0.649348 | 1776 | 35675 | 1.05038 | 0.176442 | 347 |
| rs436238 | 128414210 | C | 0.649349 | 1776 | 35675 | 1.05037 | 0.176488 | 349 |
| rs10956363 | 128420955 | G | 0.649349 | 1776 | 35675 | 1.05037 | 0.17649 | 368 |
| rs673745 | 128414451 | C | 0.649349 | 1776 | 35675 | 1.05037 | 0.176494 | 351 |
| rs4871782 | 128421416 | G | 0.649349 | 1776 | 35675 | 1.05037 | 0.176495 | 369 |
| rs418269 | 128415540 | G | 0.649349 | 1776 | 35675 | 1.05037 | 0.176496 | 355 |
| rs383205 | 128417159 | G | 0.649349 | 1776 | 35675 | 1.05037 | 0.176496 | 360 |
| rs373616 | 128417244 | T | 0.649349 | 1776 | 35675 | 1.05037 | 0.176496 | 361 |
| rs688937 | 128414563 | T | 0.64935 | 1776 | 35675 | 1.05037 | 0.176501 | 352 |
| rs385278 | 128416199 | T | 0.64935 | 1776 | 35675 | 1.05037 | 0.176501 | 356 |
| rs670725 | 128416339 | A | 0.64935 | 1776 | 35675 | 1.05037 | 0.176501 | 358 |
| rs382824 | 128416906 | T | 0.64935 | 1776 | 35675 | 1.05037 | 0.176501 | 359 |
| rs13275275 | 128418909 | A | 0.64935 | 1776 | 35675 | 1.05037 | 0.176501 | 362 |
| rs13248140 | 128419070 | G | 0.64935 | 1776 | 35675 | 1.05037 | 0.176501 | 363 |
| rs10956361 | 128419288 | G | 0.64935 | 1776 | 35675 | 1.05037 | 0.176501 | 364 |
| rs10956362 | 128419568 | A | 0.64935 | 1776 | 35675 | 1.05037 | 0.176501 | 365 |
| rs12549518 | 128378773 | G | 0.539877 | 1776 | 35675 | 1.04843 | 0.176512 | 314 |
| rs6996866 | 128379337 | C | 0.539792 | 1776 | 35675 | 1.04834 | 0.177413 | 315 |
| rs672888 | 128414645 | A | 0.649119 | 1772 | 35631 | 1.04803 | 0.197236 | 353 |
| rs420101 | 128413061 | G | 0.647409 | 1776 | 35675 | 1.04656 | 0.217992 | 343 |
| rs13281615 | 128424800 | A | 0.638485 | 1776 | 35675 | 1.0419 | 0.258421 | 374 |
| rs11785664 | 128399606 | T | 0.561559 | 1776 | 35675 | 1.03871 | 0.281956 | 278 |
| rs10447995 | 128427106 | G | 0.497839 | 1776 | 35675 | 1.0365 | 0.301301 | 377 |
| rs687279 | 128413806 | C | 0.720176 | 1772 | 35455 | 1.04014 | 0.304734 | 348 |
| rs13262406 | 128422921 | A | 0.713993 | 1776 | 35675 | 1.03936 | 0.310541 | 372 |
| rs12541832 | 128422353 | C | 0.713987 | 1776 | 35675 | 1.03955 | 0.310906 | 371 |
| rs7002712 | 128410794 | A | 0.543458 | 1776 | 35675 | 1.03598 | 0.311933 | 289 |
| rs13249993 | 128419697 | G | 0.502218 | 1776 | 35675 | 1.03298 | 0.35099 | 366 |
| rs11777532 | 128419790 | C | 0.411987 | 1776 | 35675 | 1.02219 | 0.536003 | 367 |
| rs283705 | 128386632 | T | 0.484786 | 1776 | 35675 | 1.01694 | 0.637045 | 274 |
| rs10087810 | 128421912 | T | 0.599327 | 1776 | 35675 | 1.01627 | 0.64928 | 370 |
| rs7842494 | 128435752 | A | 0.410173 | 1776 | 35675 | 1.016 | 0.650896 | 381 |
| rs9283954 | 128444552 | T | 0.409832 | 1776 | 35675 | 1.01596 | 0.652013 | 386 |
| rs13256275 | 128425408 | G | 0.519748 | 1776 | 35675 | 1.01292 | 0.724173 | 295 |
| rs7838714 | 128413130 | T | 0.550952 | 1776 | 35675 | 1.01142 | 0.751477 | 344 |
| rs978683 | 128443299 | A | 0.361727 | 1776 | 35675 | 1.01086 | 0.764541 | 385 |
| rs432470 | 128408226 | T | 0.496537 | 1776 | 35675 | 1.00706 | 0.837803 | 284 |
| rs7015780 | 128458689 | C | 0.558571 | 1776 | 35675 | 1.00677 | 0.846466 | 307 |
| rs424281 | 128408608 | A | 0.496483 | 1774 | 35333 | 1.00645 | 0.851103 | 285 |
| rs10098985 | 128424201 | T | 0.446876 | 1776 | 35675 | 1.00653 | 0.852075 | 373 |
| rs377649 | 128406423 | T | 0.439458 | 1776 | 35675 | 1.00642 | 0.854944 | 283 |
| rs386883 | 128406053 | A | 0.439405 | 1776 | 35675 | 1.00614 | 0.861254 | 282 |
| rs400818 | 128405728 | C | 0.439358 | 1776 | 35675 | 1.00589 | 0.866806 | 281 |
| rs7826557 | 128414913 | A | 0.448814 | 1776 | 35675 | 1.00523 | 0.881329 | 354 |
| rs283727 | 128382542 | A | 0.505028 | 1776 | 35675 | 1.00475 | 0.89419 | 317 |
| rs283728 | 128382682 | A | 0.505064 | 1776 | 35675 | 1.00469 | 0.895472 | 318 |
| rs2121629 | 128442209 | C | 0.413795 | 1776 | 35675 | 1.00438 | 0.899214 | 384 |
| rs283704 | 128384764 | A | 0.47441 | 1776 | 35675 | 1.00449 | 0.899924 | 273 |
| rs4143118 | 128446650 | A | 0.413125 | 1776 | 35675 | 1.00432 | 0.90219 | 389 |
| rs11776330 | 128448145 | G | 0.413158 | 1776 | 35675 | 1.00417 | 0.905673 | 394 |
| rs10956364 | 128448065 | C | 0.413159 | 1776 | 35675 | 1.00413 | 0.906654 | 393 |
| rs2392780 | 128457207 | G | 0.447304 | 1776 | 35675 | 1.00358 | 0.917411 | 399 |
| rs7815245 | 128452779 | T | 0.447022 | 1776 | 35675 | 1.00332 | 0.923576 | 396 |
| rs1562430 | 128457034 | C | 0.447396 | 1774 | 35666 | 1.00315 | 0.927443 | 398 |
| rs7845452 | 128448591 | C | 0.44702 | 1776 | 35675 | 1.00312 | 0.928049 | 395 |
| rs7002826 | 128433453 | C | 0.446808 | 1776 | 35675 | 1.00309 | 0.928786 | 379 |
| rs9693143 | 128447207 | T | 0.447111 | 1776 | 35675 | 1.00289 | 0.933363 | 391 |
| rs7007568 | 128434088 | C | 0.446781 | 1776 | 35675 | 1.00287 | 0.933834 | 380 |
| rs6988647 | 128446838 | C | 0.44702 | 1776 | 35675 | 1.00283 | 0.934878 | 390 |
| rs7815100 | 128445983 | C | 0.446941 | 1776 | 35675 | 1.00278 | 0.936001 | 388 |
| rs7831303 | 128445914 | A | 0.446501 | 1776 | 35675 | 1.00272 | 0.937251 | 387 |
| rs5022926 | 128436011 | C | 0.446758 | 1776 | 35675 | 1.00267 | 0.93852 | 382 |
| rs7014657 | 128430423 | G | 0.448956 | 1776 | 35675 | 1.00235 | 0.946569 | 378 |
| rs9693995 | 128437695 | T | 0.581987 | 1765 | 35363 | 1.00195 | 0.95563 | 383 |
| rs622556 | 128402379 | C | 0.45814 | 1776 | 35675 | 1.00141 | 0.967971 | 279 |
| rs452529 | 128402441 | C | 0.458148 | 1776 | 35675 | 1.00137 | 0.968687 | 280 |

TABLE 15
Association of surrogate markers of rs16902094 on Chromosome 8q24.21 with Prostate
Cancer. Results are shown for imputed Icelandic data set. Shown is the marker name and position
in NCBI Build 36, the risk allele and it's frequency in teh population, number of cases and
controls, the Odds ratio, and P values. Allelic codes are A = 1, C = 2, G = 3 and T = 4.

| | Pos NCBI | Risk | | No of | No of | | | Seq Id |
|---|---|---|---|---|---|---|---|---|
| Marker | B36 | Allele | Freq. | cases | controls | OR | P-Value | NO |
| rs16902103 | 128409556 | C | 0.131813 | 1776 | 35675 | 1.36387 | 1.76E−10 | 286 |
| rs13251915 | 128377137 | T | 0.251144 | 1776 | 35675 | 1.27506 | 3.32E−10 | 271 |
| rs453875 | 128390593 | G | 0.604809 | 1776 | 35675 | 1.19943 | 6.12E−07 | 276 |
| rs283720 | 128379147 | A | 0.274893 | 1775 | 35645 | 1.20581 | 6.28E−07 | 272 |
| rs1668875 | 128410285 | G | 0.635214 | 1776 | 35675 | 1.1798 | 7.14E−06 | 288 |
| rs587948 | 128410862 | T | 0.636052 | 1776 | 35675 | 1.17937 | 7.49E−06 | 290 |
| rs623401 | 128410909 | C | 0.636033 | 1776 | 35675 | 1.17934 | 7.50E−06 | 291 |
| rs11785664 | 128399606 | T | 0.561559 | 1776 | 35675 | 1.03871 | 0.281956 | 278 |
| rs7002712 | 128410794 | A | 0.543458 | 1776 | 35675 | 1.03598 | 0.311933 | 289 |
| rs16902118 | 128417799 | G | 0.147101 | 1776 | 35675 | 1.02578 | 0.607668 | 292 |
| rs283705 | 128386632 | T | 0.484786 | 1776 | 35675 | 1.01694 | 0.637045 | 274 |
| rs11774907 | 128453272 | T | 0.867662 | 1776 | 35675 | 1.02214 | 0.672607 | 305 |
| rs13256275 | 128425408 | G | 0.519748 | 1776 | 35675 | 1.01292 | 0.724173 | 295 |
| rs11782735 | 128435786 | C | 0.859779 | 1776 | 35672 | 1.01758 | 0.725966 | 300 |
| rs10095860 | 128423967 | C | 0.319759 | 1776 | 35675 | 1.01232 | 0.741499 | 293 |
| rs11776260 | 128451670 | A | 0.857308 | 1776 | 35675 | 1.0162 | 0.746102 | 304 |
| rs11784125 | 128449102 | A | 0.860193 | 1776 | 35675 | 1.01509 | 0.764269 | 303 |
| rs11782693 | 128435626 | C | 0.860078 | 1776 | 35675 | 1.01499 | 0.764883 | 298 |
| rs11782700 | 128435678 | C | 0.860078 | 1776 | 35675 | 1.01499 | 0.764883 | 299 |
| rs11774827 | 128434523 | A | 0.860079 | 1776 | 35675 | 1.01499 | 0.764926 | 297 |
| rs11785277 | 128434265 | T | 0.860079 | 1776 | 35675 | 1.01486 | 0.764956 | 296 |
| rs11783559 | 128436107 | C | 0.86009 | 1776 | 35675 | 1.01488 | 0.766454 | 301 |
| rs11783615 | 128436189 | G | 0.860094 | 1776 | 35675 | 1.01475 | 0.766568 | 302 |
| rs16902127 | 128453599 | T | 0.862712 | 1776 | 35675 | 1.01511 | 0.768103 | 306 |
| rs731900 | 128459842 | A | 0.178725 | 1776 | 35667 | 1.0105 | 0.817111 | 308 |
| rs432470 | 128408226 | T | 0.496537 | 1776 | 35675 | 1.00706 | 0.837803 | 284 |
| rs7015780 | 128458689 | C | 0.558571 | 1776 | 35675 | 1.00677 | 0.846466 | 307 |
| rs424281 | 128408608 | A | 0.496483 | 1774 | 35333 | 1.00645 | 0.851103 | 285 |
| rs377649 | 128406423 | T | 0.439458 | 1776 | 35675 | 1.00642 | 0.854944 | 283 |
| rs386883 | 128406053 | A | 0.439405 | 1776 | 35675 | 1.00614 | 0.861254 | 282 |
| rs400818 | 128405728 | C | 0.439358 | 1776 | 35675 | 1.00589 | 0.866806 | 281 |
| rs283704 | 128384764 | A | 0.47441 | 1776 | 35675 | 1.00449 | 0.899924 | 273 |
| rs16902121 | 128424100 | A | 0.140578 | 1776 | 35675 | 1.00353 | 0.944809 | 294 |
| rs622556 | 128402379 | C | 0.45814 | 1776 | 35675 | 1.00141 | 0.967971 | 279 |
| rs452529 | 128402441 | C | 0.458148 | 1776 | 35675 | 1.00137 | 0.968687 | 280 |

TABLE 16
Association of surrogate markers of rs8102476 on Chromosome 19q13.2 with Prostate
Cancer. Results are shown for imputed Icelandic data set. Shown is the marker name and
position in NCBI Build 36, the risk allele and it's frequency, number of cases and controls,
the Odds ratio, and P values. Allelic codes are A = 1, C = 2, G = 3 and T = 4.

| | Pos NCBI | Risk | | No of | No of | | | Seq Id |
|---|---|---|---|---|---|---|---|---|
| Marker | B36 | Allele | Freq. | cases | controls | OR | P-Value | NO |
| rs4803899 | 43419480 | A | 0.386877 | 1776 | 35675 | 1.08816 | 0.0369657 | 405 |
| rs1036233 | 43420054 | A | 0.567307 | 1776 | 35675 | 1.00809 | 0.840867 | 406 |
| rs7246060 | 43423502 | G | 0.577117 | 1776 | 35675 | 1.00789 | 0.843555 | 407 |
| rs12976534 | 43435802 | A | 0.473545 | 1776 | 35675 | 1.07781 | 0.0345114 | 409 |
| rs4803934 | 43438407 | C | 0.464962 | 1776 | 35675 | 1.0791 | 0.0354542 | 410 |
| rs11668070 | 43440753 | G | 0.469429 | 1776 | 35675 | 1.075 | 0.0443733 | 411 |
| rs7250689 | 43445465 | T | 0.470823 | 1776 | 35675 | 1.07073 | 0.0578493 | 412 |
| rs3786872 | 43447929 | G | 0.216697 | 1776 | 35675 | 1.01521 | 0.724665 | 415 |
| rs3786877 | 43451020 | T | 0.572758 | 1776 | 35675 | 1.0161 | 0.650939 | 416 |
| rs8101725 | 43456912 | T | 0.4074 | 1774 | 35629 | 1.00679 | 0.84644 | 418 |
| rs12611009 | 43464321 | C | 0.40738 | 1776 | 35675 | 1.00611 | 0.861486 | 420 |
| rs3826896 | 43465362 | C | 0.407243 | 1763 | 35625 | 1.00376 | 0.914642 | 421 |
| rs3900981 | 43492005 | T | 0.184993 | 1771 | 35571 | 1.05075 | 0.257728 | 430 |
| rs1052375 | 43553173 | G | 0.465617 | 1776 | 35675 | 1.01862 | 0.618262 | 433 |

### Example 3

[0324] Further surrogate markers of the anchor markers rs16902094, rs8102476, rs10934853 and rs445114 were identified using results from the 1000 genome project. This project has the goal of finding most genetic variants that have frequencies of at least 1% in the populations studied through sequencing. Details of the project are available on its website http://www.1000genomes.org.

[0325] Using data about samples of European origin, SNPs in LD with the anchor markers were identified. These SNPs as tabulated in the Tables 17-20 below represent further surrogates for the anchor markers rs16902094, rs8102476, rs10934853 and rs445114.

TABLE 17
Surrogate markers based on 1000 genome project
(http://www.1000genomes.org) to anchor marker rs10934853 on
Chromosome 3q21.3, with r² > 0.2 in Caucasians. Shown is;
Surrogate marker name, position of surrogate marker in NCBI Build 36,
the allele that is correlated with risk-allele of the anchor marker, and
D′, r², and P-values of the correlation between the markers.
Allelic codes are A = 1, C = 2, G = 3, T = 4.

| | Pos in | Risk | | | | Seq ID |
|---|---|---|---|---|---|---|
| SNP | NCBI B36 | Allele | D′ | r² | p-value | NO: |
| rs16845806 | 129193164 | A | 0.56 | 0.22 | 0.00059 | 21 |
| rs9839080 | 129194687 | T | 0.8 | 0.34 | 4.80E−07 | 500 |
| s.129194713 | 129194713 | T | 1 | 0.26 | 1.30E−07 | 501 |
| s.129195196 | 129195196 | T | 1 | 0.43 | 1.10E−11 | 502 |
| rs7630727 | 129196138 | C | 0.8 | 0.34 | 4.80E−07 | 22 |
| s.129196633 | 129196633 | G | 0.8 | 0.34 | 4.80E−07 | 503 |
| rs1549876 | 129197301 | G | 0.8 | 0.34 | 4.80E−07 | 23 |
| rs6803110 | 129197708 | G | 0.8 | 0.34 | 4.80E−07 | 504 |
| rs1549875 | 129197739 | C | 0.8 | 0.34 | 4.80E−07 | 505 |
| rs1549874 | 129197823 | G | 0.9 | 0.38 | 9.20E−07 | 506 |
| rs17282209 | 129197886 | C | 1 | 0.26 | 1.30E−07 | 24 |
| s.129198601 | 129198601 | A | 0.9 | 0.38 | 9.20E−07 | 507 |
| rs4857832 | 129198952 | A | 0.9 | 0.38 | 9.20E−07 | 508 |
| rs9870753 | 129199275 | G | 0.9 | 0.38 | 9.20E−07 | 509 |
| rs6439104 | 129200392 | C | 0.9 | 0.38 | 9.20E−07 | 25 |
| rs1469660 | 129203417 | C | 0.9 | 0.38 | 9.20E−07 | 510 |
| rs1469659 | 129203430 | T | 0.9 | 0.38 | 9.20E−07 | 26 |
| rs6781473 | 129203731 | T | 0.9 | 0.38 | 9.20E−07 | 511 |
| rs9859280 | 129203932 | T | 0.9 | 0.38 | 9.20E−07 | 512 |
| rs58170120 | 129204023 | A | 0.9 | 0.38 | 9.20E−07 | 513 |
| rs28520291 | 129204065 | C | 1 | 0.36 | 5.50E−10 | 514 |
| rs11924838 | 129204198 | A | 0.9 | 0.38 | 9.20E−07 | 515 |
| rs11917022 | 129204233 | T | 1 | 0.4 | 8.10E−11 | 516 |
| rs11924866 | 129204293 | C | 0.9 | 0.38 | 9.20E−07 | 517 |
| rs10433341 | 129204549 | A | 0.9 | 0.38 | 9.20E−07 | 518 |
| rs7633480 | 129205698 | A | 0.9 | 0.38 | 9.20E−07 | 519 |
| rs7645109 | 129205707 | C | 0.9 | 0.38 | 9.20E−07 | 520 |
| rs7611426 | 129205887 | G | 0.9 | 0.38 | 9.20E−07 | 521 |
| rs7611430 | 129205905 | G | 0.8 | 0.34 | 4.80E−07 | 27 |
| rs67464627 | 129205923 | T | 0.9 | 0.38 | 9.20E−07 | 522 |
| rs6767360 | 129206835 | G | 0.9 | 0.38 | 9.20E−07 | 523 |
| rs6770337 | 129207423 | G | 0.8 | 0.34 | 4.80E−07 | 28 |
| rs6794938 | 129207441 | G | 0.8 | 0.34 | 4.80E−07 | 524 |
| rs6777095 | 129209327 | A | 1 | 0.47 | 1.50E−12 | 29 |
| rs6777197 | 129209427 | A | 1 | 0.47 | 1.50E−12 | 525 |
| rs6777484 | 129209686 | A | 1 | 0.47 | 1.50E−12 | 526 |
| rs6766665 | 129210140 | T | 1 | 0.43 | 1.10E−11 | 527 |
| rs11717102 | 129210442 | C | 0.88 | 0.48 | 1.00E−09 | 528 |
| rs10934838 | 129213009 | C | 0.88 | 0.51 | 3.40E−10 | 529 |
| rs9824657 | 129213456 | T | 1 | 0.47 | 1.50E−12 | 530 |
| rs9809866 | 129214363 | C | 1 | 0.47 | 1.50E−12 | 531 |
| rs4602341 | 129215781 | A | 1 | 0.43 | 1.10E−11 | 30 |
| rs35546672 | 129223143 | C | 0.88 | 0.51 | 3.40E−10 | 532 |
| rs4857833 | 129228387 | G | 0.88 | 0.51 | 3.40E−10 | 31 |
| rs6439108 | 129228455 | G | 0.88 | 0.51 | 3.40E−10 | 32 |
| rs6764517 | 129230531 | A | 1 | 0.47 | 1.50E−12 | 33 |
| rs981447 | 129236378 | G | 0.88 | 0.51 | 3.40E−10 | 34 |
| rs981446 | 129236420 | G | 0.88 | 0.51 | 3.40E−10 | 35 |
| s.129236731 | 129236731 | T | 1 | 0.27 | 1.00E−10 | 533 |
| rs1469658 | 129241904 | T | 1 | 0.47 | 1.50E−12 | 36 |
| rs1469657 | 129242358 | C | 1 | 0.47 | 1.50E−12 | 534 |
| s.129243618 | 129243618 | G | 0.88 | 0.51 | 3.40E−10 | 535 |
| rs4857834 | 129245944 | T | 1 | 0.47 | 1.50E−12 | 536 |
| rs1473246 | 129252098 | G | 0.88 | 0.51 | 3.40E−10 | 537 |
| rs2335772 | 129255226 | G | 0.91 | 0.3 | 1.50E−06 | 37 |
| s.129256165 | 129256165 | A | 0.88 | 0.51 | 3.40E−10 | 538 |
| s.129256166 | 129256166 | G | 1 | 0.26 | 1.90E−10 | 539 |
| rs1030656 | 129256317 | G | 0.88 | 0.51 | 3.40E−10 | 38 |
| rs1030655 | 129256366 | T | 0.88 | 0.51 | 3.40E−10 | 39 |
| rs2335771 | 129262634 | A | 0.88 | 0.51 | 3.40E−10 | 40 |
| rs759945 | 129262772 | G | 1 | 0.47 | 1.50E−12 | 41 |
| s.129264066 | 129264066 | A | 1 | 0.23 | 7.70E−07 | 540 |
| rs4857864 | 129264427 | G | 1 | 0.43 | 1.10E−11 | 541 |
| rs9864797 | 129265117 | G | 1 | 0.47 | 1.50E−12 | 542 |
| rs59766347 | 129265926 | C | 0.88 | 0.51 | 3.40E−10 | 543 |
| rs2075402 | 129266952 | C | 0.88 | 0.51 | 3.40E−10 | 42 |
| rs6439111 | 129267302 | C | 0.88 | 0.51 | 3.40E−10 | 544 |
| rs10934848 | 129273234 | G | 1 | 0.4 | 8.10E−11 | 545 |
| rs2241688 | 129273296 | G | 1 | 0.47 | 1.50E−12 | 546 |
| rs1554534 | 129282359 | G | 1 | 0.43 | 1.10E−11 | 43 |
| rs3732402 | 129288908 | G | 0.88 | 0.51 | 3.40E−10 | 44 |
| rs6439112 | 129289804 | G | 1 | 0.47 | 1.50E−12 | 547 |
| rs7355887 | 129291192 | C | 1 | 0.86 | 9.90E−24 | 548 |
| rs9855015 | 129291505 | A | 1 | 0.47 | 1.50E−12 | 549 |
| rs35724792 | 129292306 | G | 1 | 0.3 | 2.20E−08 | 550 |
| rs34403909 | 129293135 | G | 1 | 0.3 | 2.20E−08 | 551 |
| s.129293428 | 129293428 | G | 1 | 0.3 | 2.20E−08 | 552 |
| rs13091198 | 129294727 | T | 1 | 0.26 | 1.30E−07 | 45 |
| rs55684215 | 129295482 | A | 1 | 0.26 | 1.30E−07 | 553 |
| s.129296501 | 129296501 | T | 1 | 0.3 | 2.20E−08 | 554 |
| rs36069551 | 129296767 | A | 1 | 0.26 | 1.30E−07 | 555 |
| rs11714052 | 129297147 | A | 1 | 0.26 | 1.30E−07 | 46 |
| rs4058156 | 129298165 | T | 1 | 0.47 | 1.50E−12 | 556 |
| rs36059338 | 129298617 | G | 1 | 0.3 | 2.20E−08 | 557 |
| rs34228187 | 129299123 | C | 1 | 0.3 | 2.20E−08 | 558 |
| rs6439113 | 129299262 | A | 1 | 0.47 | 1.50E−12 | 47 |
| s.129299712 | 129299712 | T | 1 | 0.3 | 2.20E−08 | 559 |
| rs6787614 | 129300168 | A | 1 | 0.3 | 2.20E−08 | 48 |
| rs7632756 | 129300198 | C | 1 | 0.86 | 9.90E−24 | 560 |
| rs11720239 | 129300645 | G | 1 | 0.26 | 1.30E−07 | 49 |
| rs34709844 | 129301559 | A | 1 | 0.3 | 2.20E−08 | 561 |
| rs4857866 | 129301752 | G | 1 | 0.86 | 9.90E−24 | 562 |
| rs4857867 | 129301841 | T | 1 | 0.47 | 1.50E−12 | 563 |
| s.129304711 | 129304711 | C | 1 | 0.3 | 2.20E−08 | 564 |
| rs7641133 | 129305010 | T | 1 | 0.86 | 9.90E−24 | 51 |
| s.129306336 | 129306336 | T | 1 | 0.33 | 3.60E−09 | 565 |
| rs9835383 | 129306707 | A | 1 | 0.43 | 1.10E−11 | 566 |
| s.129307349 | 129307349 | G | 1 | 0.3 | 2.20E−08 | 567 |
| s.129307468 | 129307468 | T | 1 | 0.3 | 2.20E−08 | 568 |
| s.129307768 | 129307768 | G | 1 | 0.3 | 2.20E−08 | 569 |
| rs35437840 | 129307996 | T | 1 | 0.3 | 2.20E−08 | 570 |
| s.129309269 | 129309269 | G | 1 | 0.3 | 2.20E−08 | 571 |
| rs11924142 | 129309308 | C | 1 | 0.47 | 1.50E−12 | 52 |
| rs13082038 | 129311146 | G | 1 | 0.26 | 1.30E−07 | 572 |
| rs60387553 | 129311658 | A | 1 | 0.3 | 2.20E−08 | 573 |
| s.129313728 | 129313728 | G | 1 | 0.3 | 2.20E−08 | 574 |
| rs35947214 | 129315921 | G | 1 | 0.3 | 2.20E−08 | 575 |
| rs67940364 | 129316043 | C | 1 | 0.26 | 1.30E−07 | 576 |
| rs7650365 | 129316693 | G | 0.91 | 0.31 | 7.30E−07 | 53 |
| rs6785535 | 129317385 | G | 1 | 0.26 | 1.30E−07 | 577 |
| rs6788879 | 129318319 | A | 1 | 0.47 | 1.50E−12 | 54 |
| rs6439115 | 129318493 | C | 1 | 0.43 | 1.10E−11 | 55 |
| rs4857836 | 129318977 | C | 1 | 0.86 | 9.90E−24 | 56 |
| rs4857837 | 129319009 | A | 1 | 0.86 | 9.90E−24 | 57 |
| s.129320198 | 129320198 | T | 1 | 0.26 | 1.30E−07 | 578 |
| rs11707462 | 129321320 | C | 1 | 0.3 | 2.20E−08 | 58 |
| rs9821568 | 129321689 | G | 1 | 0.47 | 1.50E−12 | 59 |
| rs67577411 | 129322715 | G | 1 | 0.26 | 1.30E−07 | 579 |
| s.129323137 | 129323137 | G | 1 | 0.3 | 2.20E−08 | 580 |
| s.129323200 | 129323200 | A | 1 | 0.3 | 2.20E−08 | 581 |
| s.129323256 | 129323256 | C | 1 | 0.26 | 1.30E−07 | 582 |
| s.129323750 | 129323750 | T | 1 | 0.3 | 2.20E−08 | 583 |
| s.129323788 | 129323788 | A | 1 | 0.26 | 1.30E−07 | 584 |
| s.129324434 | 129324434 | A | 1 | 0.3 | 2.20E−08 | 585 |
| rs6784159 | 129326068 | C | 1 | 0.3 | 2.20E−08 | 60 |
| rs2811475 | 129328391 | C | 1 | 0.47 | 1.50E−12 | 61 |
| s.129329988 | 129329988 | A | 1 | 0.26 | 1.30E−07 | 586 |
| s.129330108 | 129330108 | G | 1 | 0.3 | 2.20E−08 | 587 |
| rs55762931 | 129330365 | T | 1 | 0.3 | 2.20E−08 | 588 |
| rs13095660 | 129330846 | T | 1 | 0.3 | 2.20E−08 | 62 |
| rs6788497 | 129331078 | T | 1 | 0.3 | 2.20E−08 | 589 |
| rs6439116 | 129331757 | C | 1 | 0.3 | 2.20E−08 | 63 |
| rs11714619 | 129332766 | A | 1 | 0.3 | 2.20E−08 | 590 |
| s.129334251 | 129334251 | A | 1 | 0.3 | 2.20E−08 | 591 |
| rs4857868 | 129336163 | T | 1 | 0.47 | 1.50E−12 | 592 |
| rs35347185 | 129337217 | T | 1 | 0.26 | 1.30E−07 | 593 |
| rs2811471 | 129337374 | G | 1 | 0.47 | 1.50E−12 | 594 |
| s.129338521 | 129338521 | G | 1 | 0.23 | 7.70E−07 | 595 |
| s.129338524 | 129338524 | C | 1 | 0.26 | 1.30E−07 | 596 |
| rs13069054 | 129338672 | A | 1 | 0.3 | 2.20E−08 | 597 |
| rs6810006 | 129338748 | A | 1 | 0.3 | 2.20E−08 | 598 |
| s.129339090 | 129339090 | T | 1 | 0.3 | 2.20E−08 | 599 |
| rs6414310 | 129339263 | T | 1 | 0.86 | 9.90E−24 | 64 |
| s.129340623 | 129340623 | C | 1 | 0.3 | 2.20E−08 | 600 |
| rs12496052 | 129341765 | T | 0.87 | 0.42 | 4.10E−08 | 601 |
| rs56175090 | 129342770 | A | 1 | 0.26 | 1.30E−07 | 602 |
| s.129343169 | 129343169 | G | 1 | 0.3 | 2.20E−08 | 603 |
| rs34372443 | 129343184 | G | 1 | 0.3 | 2.20E−08 | 604 |
| s.129343748 | 129343748 | A | 1 | 0.26 | 1.30E−07 | 605 |
| s.129344512 | 129344512 | A | 1 | 0.47 | 1.50E−12 | 606 |
| s.129348249 | 129348249 | G | 1 | 0.3 | 2.20E−08 | 607 |
| rs67451924 | 129350087 | A | 1 | 0.86 | 9.90E−24 | 608 |
| s.129350282 | 129350282 | G | 1 | 0.47 | 1.50E−12 | 609 |
| s.129350965 | 129350965 | A | 1 | 0.3 | 2.20E−08 | 610 |
| s.129351011 | 129351011 | T | 1 | 0.3 | 2.20E−08 | 611 |
| s.129351855 | 129351855 | A | 1 | 0.47 | 1.50E−12 | 612 |
| s.129352517 | 129352517 | C | 0.89 | 0.22 | 2.90E−05 | 613 |
| s.129352750 | 129352750 | A | 1 | 0.86 | 9.90E−24 | 614 |
| s.129352959 | 129352959 | T | 1 | 0.3 | 2.20E−08 | 615 |
| s.129353619 | 129353619 | G | 1 | 0.47 | 1.50E−12 | 616 |
| rs11920225 | 129354865 | G | 1 | 0.47 | 1.50E−12 | 66 |
| rs11711710 | 129355196 | T | 1 | 0.3 | 2.20E−08 | 617 |
| rs2999046 | 129355486 | T | 1 | 0.47 | 1.50E−12 | 618 |
| rs11709066 | 129357602 | A | 1 | 0.3 | 2.20E−08 | 67 |
| rs11716941 | 129358064 | G | 1 | 0.3 | 2.20E−08 | 68 |
| s.129360075 | 129360075 | C | 1 | 0.43 | 1.10E−11 | 619 |
| rs2955114 | 129360446 | C | 1 | 0.47 | 1.50E−12 | 620 |
| s.129360754 | 129360754 | T | 1 | 0.47 | 1.50E−12 | 621 |
| s.129361020 | 129361020 | G | 1 | 0.43 | 1.10E−11 | 622 |
| rs2999048 | 129361106 | A | 1 | 0.86 | 9.90E−24 | 623 |
| s.129361507 | 129361507 | C | 1 | 0.86 | 9.90E−24 | 624 |
| rs2811472 | 129361561 | G | 1 | 0.43 | 1.10E−11 | 69 |
| s.129362916 | 129362916 | C | 1 | 0.26 | 1.30E−07 | 625 |
| s.129364258 | 129364258 | T | 1 | 0.3 | 2.20E−08 | 626 |
| s.129364303 | 129364303 | A | 0.9 | 0.7 | 7.00E−14 | 627 |
| rs2955118 | 129364754 | A | 1 | 0.86 | 9.90E−24 | 628 |
| rs13077913 | 129365294 | A | 1 | 0.3 | 2.20E−08 | 70 |
| rs13077790 | 129365348 | T | 1 | 0.3 | 2.20E−08 | 71 |
| s.129365482 | 129365482 | C | 1 | 0.26 | 1.30E−07 | 629 |
| rs2811473 | 129367627 | C | 1 | 0.47 | 1.50E−12 | 72 |
| rs2687728 | 129367698 | A | 1 | 0.47 | 1.50E−12 | 73 |
| rs10934850 | 129369647 | A | 1 | 0.23 | 7.70E−07 | 74 |
| rs872267 | 129370757 | A | 1 | 0.86 | 9.90E−24 | 75 |
| s.129370865 | 129370865 | G | 1 | 0.26 | 1.30E−07 | 630 |
| rs2955120 | 129371037 | G | 1 | 0.86 | 9.90E−24 | 631 |
| rs2687731 | 129371384 | T | 1 | 0.43 | 1.10E−11 | 76 |
| s.129371668 | 129371668 | T | 1 | 0.47 | 1.50E−12 | 632 |
| rs3122173 | 129371977 | G | 1 | 0.86 | 9.90E−24 | 633 |
| rs3122174 | 129372065 | G | 1 | 0.47 | 1.50E−12 | 77 |
| rs2999051 | 129372094 | C | 0.87 | 0.42 | 4.10E−08 | 78 |
| rs13067650 | 129372232 | A | 1 | 0.3 | 2.20E−08 | 79 |
| rs2248668 | 129373439 | G | 1 | 0.47 | 1.50E−12 | 80 |
| rs2955121 | 129374086 | G | 1 | 0.43 | 1.10E−11 | 81 |
| rs11706455 | 129374681 | A | 1 | 0.3 | 2.20E−08 | 82 |
| rs2999052 | 129374727 | C | 1 | 0.86 | 9.90E−24 | 83 |
| s.129375541 | 129375541 | C | 1 | 0.47 | 1.50E−12 | 634 |
| rs11715394 | 129376254 | T | 1 | 0.3 | 2.20E−08 | 84 |
| s.129376984 | 129376984 | C | 1 | 0.3 | 2.20E−08 | 635 |
| rs2687729 | 129377916 | G | 1 | 0.91 | 2.70E−25 | 85 |
| rs1554535 | 129378676 | A | 1 | 0.86 | 9.90E−24 | 636 |
| s.129380076 | 129380076 | G | 1 | 0.33 | 3.60E−09 | 637 |
| rs2811476 | 129381191 | C | 1 | 0.86 | 9.90E−24 | 638 |
| rs2999053 | 129381223 | A | 1 | 0.47 | 1.50E−12 | 639 |
| rs2811477 | 129381473 | T | 1 | 0.3 | 2.20E−08 | 640 |
| s.129381633 | 129381633 | T | 1 | 0.36 | 5.50E−10 | 641 |
| rs2811478 | 129382314 | T | 1 | 0.3 | 2.20E−08 | 86 |
| s.129382676 | 129382676 | A | 1 | 0.47 | 1.50E−12 | 642 |
| rs2999060 | 129383184 | G | 1 | 0.47 | 1.50E−12 | 87 |
| rs2999055 | 129383212 | T | 1 | 0.47 | 1.50E−12 | 643 |
| s.129383929 | 129383929 | C | 1 | 0.2 | 4.30E−06 | 644 |
| s.129384476 | 129384476 | A | 1 | 0.86 | 9.90E−24 | 645 |
| rs2811480 | 129384781 | T | 1 | 0.86 | 9.90E−24 | 646 |
| rs2999056 | 129386212 | A | 1 | 0.43 | 1.10E−11 | 88 |
| rs2955123 | 129386368 | C | 1 | 0.47 | 1.50E−12 | 89 |
| s.129386658 | 129386658 | G | 1 | 0.2 | 4.30E−06 | 647 |
| rs2811517 | 129386880 | C | 1 | 0.47 | 1.50E−12 | 90 |
| s.129387186 | 129387186 | C | 1 | 0.86 | 9.90E−24 | 648 |
| rs2811482 | 129387633 | T | 1 | 0.86 | 9.90E−24 | 649 |
| rs2811516 | 129388141 | G | 1 | 0.86 | 9.90E−24 | 91 |
| rs2811515 | 129388208 | A | 1 | 0.86 | 9.90E−24 | 92 |
| s.129388338 | 129388338 | T | 1 | 0.47 | 1.50E−12 | 650 |
| rs2811514 | 129390619 | G | 1 | 0.86 | 9.90E−24 | 93 |
| rs2811513 | 129392254 | A | 1 | 0.86 | 9.90E−24 | 651 |
| s.129392448 | 129392448 | T | 1 | 0.43 | 1.10E−11 | 652 |
| rs2811512 | 129394510 | A | 1 | 0.86 | 9.90E−24 | 94 |
| s.129395583 | 129395583 | A | 1 | 0.26 | 1.30E−07 | 653 |
| rs2811511 | 129395678 | A | 1 | 0.3 | 2.20E−08 | 95 |
| rs883238 | 129395953 | G | 1 | 0.86 | 9.90E−24 | 96 |
| rs940061 | 129396404 | G | 1 | 0.4 | 8.10E−11 | 97 |
| s.129396518 | 129396518 | A | 1 | 0.47 | 1.50E−12 | 654 |
| rs2811510 | 129397202 | G | 1 | 0.47 | 1.50E−12 | 98 |
| rs2811483 | 129397363 | C | 1 | 0.47 | 1.50E−12 | 99 |
| rs2811484 | 129397543 | A | 1 | 0.47 | 1.50E−12 | 100 |
| rs2687730 | 129398147 | T | 1 | 0.3 | 2.20E−08 | 101 |
| rs2955124 | 129399180 | T | 1 | 0.47 | 1.50E−12 | 655 |
| rs2811509 | 129399241 | A | 1 | 0.86 | 9.90E−24 | 102 |
| rs2492285 | 129400690 | A | 1 | 0.86 | 9.90E−24 | 103 |
| rs2687720 | 129401645 | T | 1 | 0.86 | 9.90E−24 | 104 |
| s.129401735 | 129401735 | A | 1 | 0.86 | 9.90E−24 | 656 |
| s.129401736 | 129401736 | T | 1 | 0.86 | 9.90E−24 | 657 |
| s.129402107 | 129402107 | T | 1 | 0.47 | 1.50E−12 | 658 |
| rs2811508 | 129402713 | C | 1 | 0.86 | 9.90E−24 | 105 |
| rs2811486 | 129402765 | G | 1 | 0.3 | 2.20E−08 | 106 |
| rs6439119 | 129405877 | T | 1 | 0.86 | 9.90E−24 | 107 |
| s.129406500 | 129406500 | A | 1 | 0.47 | 1.50E−12 | 659 |
| rs2955125 | 129407882 | G | 1 | 0.47 | 1.50E−12 | 108 |
| s.129408735 | 129408735 | C | 0.87 | 0.42 | 4.10E−08 | 660 |
| rs2955126 | 129408944 | A | 1 | 0.3 | 2.20E−08 | 109 |
| rs2955127 | 129409206 | G | 1 | 0.47 | 1.50E−12 | 110 |
| s.129410967 | 129410967 | T | 1 | 0.47 | 1.50E−12 | 661 |
| rs2955129 | 129411897 | T | 1 | 0.3 | 2.20E−08 | 112 |
| rs9838120 | 129413149 | A | 1 | 0.86 | 9.90E−24 | 662 |
| rs7374072 | 129413556 | C | 1 | 0.86 | 9.90E−24 | 113 |
| rs2999090 | 129414030 | G | 1 | 0.3 | 2.20E−08 | 114 |
| rs7372439 | 129414092 | A | 1 | 0.86 | 9.90E−24 | 115 |
| s.129415893 | 129415893 | G | 1 | 0.86 | 9.90E−24 | 663 |
| rs4857871 | 129416476 | C | 1 | 0.86 | 9.90E−24 | 116 |
| rs4857872 | 129416512 | T | 1 | 0.86 | 9.90E−24 | 117 |
| rs4857873 | 129416908 | A | 1 | 0.86 | 9.90E−24 | 118 |
| rs4857874 | 129416959 | A | 1 | 0.86 | 9.90E−24 | 664 |
| rs4857875 | 129416966 | C | 1 | 0.86 | 9.90E−24 | 665 |
| rs6770140 | 129417019 | T | 1 | 0.86 | 9.90E−24 | 119 |
| rs4384971 | 129417464 | C | 1 | 0.86 | 9.90E−24 | 120 |
| rs2999089 | 129417849 | C | 1 | 0.3 | 2.20E−08 | 121 |
| rs6439121 | 129418151 | G | 1 | 0.86 | 9.90E−24 | 122 |
| rs9879865 | 129419217 | C | 1 | 0.86 | 9.90E−24 | 666 |
| rs9879866 | 129419222 | C | 1 | 0.82 | 2.60E−22 | 667 |
| rs2254379 | 129420016 | C | 1 | 0.47 | 1.50E−12 | 123 |
| rs9847576 | 129420335 | A | 1 | 0.86 | 9.90E−24 | 668 |
| rs2955130 | 129420504 | G | 1 | 0.3 | 2.20E−08 | 124 |
| rs9814834 | 129420827 | G | 1 | 0.86 | 9.90E−24 | 125 |
| rs2811549 | 129421398 | T | 1 | 0.3 | 2.20E−08 | 669 |
| rs9857235 | 129421724 | A | 1 | 0.86 | 9.90E−24 | 670 |
| s.129422134 | 129422134 | A | 1 | 0.47 | 1.50E−12 | 671 |
| rs2955132 | 129422916 | C | 1 | 0.47 | 1.50E−12 | 126 |
| rs9845651 | 129423043 | T | 1 | 0.86 | 9.90E−24 | 127 |
| rs7372902 | 129423130 | G | 1 | 0.86 | 9.90E−24 | 672 |
| rs6439122 | 129423224 | A | 1 | 0.86 | 9.90E−24 | 128 |
| s.129423563 | 129423563 | T | 0.9 | 0.28 | 5.50E−06 | 673 |
| s.129423762 | 129423762 | T | 1 | 0.47 | 1.50E−12 | 674 |
| rs6439123 | 129424129 | T | 1 | 0.86 | 9.90E−24 | 675 |
| s.129424637 | 129424637 | G | 1 | 0.47 | 1.50E−12 | 676 |
| rs9873786 | 129425069 | A | 1 | 0.86 | 9.90E−24 | 129 |
| rs4857838 | 129426018 | A | 1 | 0.86 | 9.90E−24 | 130 |
| rs6775988 | 129427167 | C | 1 | 0.86 | 9.90E−24 | 131 |
| rs2955133 | 129428012 | T | 1 | 0.26 | 1.30E−07 | 677 |
| rs6777054 | 129428039 | G | 1 | 0.86 | 9.90E−24 | 678 |
| rs9830294 | 129429478 | G | 1 | 0.86 | 9.90E−24 | 132 |
| s.129429722 | 129429722 | C | 1 | 0.43 | 1.10E−11 | 679 |
| rs4857877 | 129430750 | A | 1 | 0.86 | 9.90E−24 | 133 |
| rs4857878 | 129430839 | T | 1 | 0.86 | 9.90E−24 | 680 |
| s.129431649 | 129431649 | C | 1 | 0.86 | 9.90E−24 | 681 |
| rs2999086 | 129433938 | C | 1 | 0.3 | 2.20E−08 | 134 |
| rs2999085 | 129434249 | G | 1 | 0.3 | 2.20E−08 | 135 |
| rs2999084 | 129435178 | A | 1 | 0.3 | 2.20E−08 | 136 |
| rs6809833 | 129435609 | A | 1 | 0.26 | 1.30E−07 | 682 |
| s.129436659 | 129436659 | G | 0.91 | 0.29 | 2.90E−06 | 683 |
| rs2999083 | 129437124 | C | 1 | 0.3 | 2.20E−08 | 137 |
| rs2999082 | 129438878 | A | 1 | 0.3 | 2.20E−08 | 684 |
| rs2999081 | 129438962 | A | 1 | 0.3 | 2.20E−08 | 138 |
| rs2999080 | 129439398 | G | 1 | 0.3 | 2.20E−08 | 685 |
| rs2999079 | 129439922 | T | 1 | 0.3 | 2.20E−08 | 139 |
| rs4074440 | 129440703 | G | 1 | 0.86 | 9.90E−24 | 140 |
| rs2999076 | 129441382 | T | 1 | 0.3 | 2.20E−08 | 686 |
| rs2955077 | 129441559 | A | 1 | 0.3 | 2.20E−08 | 141 |
| rs2955078 | 129441876 | A | 1 | 0.3 | 2.20E−08 | 687 |
| rs2955079 | 129442514 | T | 1 | 0.3 | 2.20E−08 | 688 |
| rs2955080 | 129442555 | C | 1 | 0.26 | 1.30E−07 | 689 |
| s.129442734 | 129442734 | T | 1 | 0.43 | 1.10E−11 | 690 |
| rs2999074 | 129442899 | T | 1 | 0.3 | 2.20E−08 | 691 |
| rs2955081 | 129442989 | A | 1 | 0.3 | 2.20E−08 | 692 |
| rs2955082 | 129443024 | G | 1 | 0.3 | 2.20E−08 | 693 |
| rs2955083 | 129443868 | T | 1 | 0.3 | 2.20E−08 | 694 |
| rs2955084 | 129443995 | T | 1 | 0.3 | 2.20E−08 | 695 |
| rs9843281 | 129444086 | A | 1 | 0.86 | 9.90E−24 | 142 |
| rs2999073 | 129445019 | G | 1 | 0.3 | 2.20E−08 | 143 |
| rs2955085 | 129445447 | G | 1 | 0.3 | 2.20E−08 | 144 |
| rs2999072 | 129445566 | G | 1 | 0.3 | 2.20E−08 | 145 |
| s.129445881 | 129445881 | G | 1 | 0.3 | 2.20E−08 | 696 |
| s.129445882 | 129445882 | A | 1 | 0.3 | 2.20E−08 | 697 |
| rs13434079 | 129446138 | A | 1 | 0.86 | 9.90E−24 | 146 |
| rs2999071 | 129446305 | G | 1 | 0.3 | 2.20E−08 | 698 |
| rs2955088 | 129446400 | C | 1 | 0.3 | 2.20E−08 | 147 |
| rs2999070 | 129447341 | G | 1 | 0.3 | 2.20E−08 | 148 |
| rs17343355 | 129449481 | C | 0.91 | 0.29 | 2.90E−06 | 149 |
| rs2955089 | 129452020 | G | 1 | 0.3 | 2.20E−08 | 699 |
| rs2955090 | 129452061 | T | 1 | 0.3 | 2.20E−08 | 150 |
| rs2955091 | 129454051 | G | 1 | 0.26 | 1.30E−07 | 151 |
| rs2999069 | 129454299 | C | 1 | 0.3 | 2.20E−08 | 152 |
| rs2955092 | 129455218 | C | 1 | 0.3 | 2.20E−08 | 153 |
| rs2955094 | 129459613 | A | 1 | 0.3 | 2.20E−08 | 154 |
| rs2955095 | 129460355 | A | 1 | 0.3 | 2.20E−08 | 155 |
| rs2955096 | 129460556 | A | 1 | 0.3 | 2.20E−08 | 156 |
| rs2999068 | 129460668 | T | 1 | 0.3 | 2.20E−08 | 157 |
| rs2955097 | 129461195 | G | 1 | 0.3 | 2.20E−08 | 700 |
| rs2999067 | 129461221 | C | 1 | 0.3 | 2.20E−08 | 158 |
| s.129461485 | 129461485 | G | 1 | 0.86 | 9.90E−24 | 701 |
| rs2955098 | 129462191 | T | 1 | 0.3 | 2.20E−08 | 702 |
| rs2955099 | 129462344 | G | 1 | 0.26 | 1.30E−07 | 159 |
| s.129462511 | 129462511 | A | 1 | 0.2 | 9.80E−09 | 703 |
| rs2999066 | 129462976 | T | 1 | 0.3 | 2.20E−08 | 160 |
| rs2999065 | 129464128 | A | 1 | 0.3 | 2.20E−08 | 161 |
| rs2999035 | 129465899 | T | 1 | 0.47 | 1.50E−12 | 163 |
| rs2811544 | 129466185 | T | 1 | 0.3 | 2.20E−08 | 164 |
| rs2811543 | 129466486 | T | 1 | 0.3 | 2.20E−08 | 165 |
| rs2811542 | 129466490 | A | 1 | 0.3 | 2.20E−08 | 704 |
| s.129466683 | 129466683 | A | 1 | 0.3 | 2.20E−08 | 705 |
| s.129466684 | 129466684 | C | 1 | 0.3 | 2.20E−08 | 706 |
| s.129466686 | 129466686 | G | 1 | 0.36 | 5.50E−10 | 707 |
| rs2811541 | 129467484 | C | 1 | 0.26 | 1.30E−07 | 166 |
| rs2811540 | 129468259 | T | 1 | 0.3 | 2.20E−08 | 167 |
| rs2811539 | 129469163 | C | 1 | 0.3 | 2.20E−08 | 168 |
| rs2811538 | 129469321 | A | 1 | 0.26 | 1.30E−07 | 169 |
| rs2811396 | 129470046 | A | 1 | 0.3 | 2.20E−08 | 170 |
| rs2811400 | 129470557 | G | 1 | 0.26 | 1.30E−07 | 171 |
| rs2811537 | 129470614 | A | 1 | 0.3 | 2.20E−08 | 172 |
| s.129470765 | 129470765 | T | 0.91 | 0.29 | 2.90E−06 | 708 |
| rs2999064 | 129470930 | G | 1 | 0.47 | 1.50E−12 | 173 |
| rs2811536 | 129471609 | A | 1 | 0.3 | 2.20E−08 | 174 |
| rs2811534 | 129473798 | A | 1 | 0.3 | 2.20E−08 | 175 |
| rs2811413 | 129473839 | C | 0.9 | 0.7 | 7.00E−14 | 176 |
| rs2811414 | 129473867 | G | 1 | 0.26 | 1.30E−07 | 709 |
| rs2811533 | 129474419 | G | 1 | 0.26 | 1.30E−07 | 178 |
| rs2811416 | 129474628 | T | 1 | 0.3 | 2.20E−08 | 179 |
| rs2811532 | 129474860 | G | 1 | 0.26 | 1.30E−07 | 180 |
| rs2811531 | 129475185 | G | 1 | 0.3 | 2.20E−08 | 181 |
| rs2811530 | 129475856 | A | 1 | 0.3 | 2.20E−08 | 710 |
| rs2955100 | 129476015 | G | 1 | 0.3 | 2.20E−08 | 182 |
| s.129476296 | 129476296 | A | 1 | 0.3 | 2.20E−08 | 711 |
| rs2999061 | 129476313 | A | 1 | 0.3 | 2.20E−08 | 183 |
| rs2811529 | 129476850 | G | 1 | 0.86 | 9.90E−24 | 184 |
| rs2811528 | 129477126 | A | 1 | 0.3 | 2.20E−08 | 712 |
| rs2811527 | 129477294 | A | 1 | 0.3 | 2.20E−08 | 185 |
| rs2811526 | 129478408 | A | 1 | 0.3 | 2.20E−08 | 713 |
| rs2811373 | 129480119 | T | 1 | 0.3 | 2.20E−08 | 186 |
| rs2811381 | 129480602 | A | 1 | 0.3 | 2.20E−08 | 714 |
| rs2811525 | 129482120 | T | 1 | 0.3 | 2.20E−08 | 187 |
| rs2811524 | 129482645 | G | 1 | 0.3 | 2.20E−08 | 715 |
| rs2811386 | 129482705 | A | 1 | 0.3 | 2.20E−08 | 716 |
| rs7374952 | 129484057 | T | 1 | 0.3 | 2.20E−08 | 188 |
| rs7374227 | 129484205 | G | 1 | 0.3 | 2.20E−08 | 189 |
| rs6765233 | 129485540 | T | 1 | 0.82 | 2.60E−22 | 717 |
| rs4593050 | 129487221 | T | 1 | 0.3 | 2.20E−08 | 190 |
| rs6439124 | 129490156 | A | 1 | 0.3 | 2.20E−08 | 191 |
| rs7373998 | 129490913 | A | 1 | 0.3 | 2.20E−08 | 192 |
| rs2955101 | 129492302 | A | 1 | 0.3 | 2.20E−08 | 193 |
| rs2811523 | 129494087 | A | 1 | 0.26 | 1.30E−07 | 718 |
| rs2811522 | 129494113 | T | 1 | 0.3 | 2.20E−08 | 719 |
| rs2811520 | 129494967 | G | 1 | 0.3 | 2.20E−08 | 720 |
| rs11718884 | 129495205 | A | 1 | 0.2 | 9.80E−09 | 721 |
| rs10934852 | 129495212 | A | 0.91 | 0.29 | 2.90E−06 | 722 |
| rs2811519 | 129495566 | T | 1 | 0.3 | 2.20E−08 | 194 |
| rs2811518 | 129496335 | G | 1 | 0.3 | 2.20E−08 | 195 |
| rs2811387 | 129497868 | C | 1 | 0.3 | 2.20E−08 | 723 |
| rs2955103 | 129497926 | C | 0.87 | 0.42 | 4.10E−08 | 196 |
| rs2811388 | 129501137 | A | 1 | 0.3 | 2.20E−08 | 197 |
| rs2999036 | 129503391 | G | 1 | 0.3 | 2.20E−08 | 198 |
| s.129504052 | 129504052 | A | 1 | 0.26 | 1.30E−07 | 724 |
| rs2811390 | 129504171 | T | 1 | 0.3 | 2.20E−08 | 199 |
| rs2811391 | 129505058 | A | 1 | 0.3 | 2.20E−08 | 200 |
| rs2811392 | 129506666 | G | 1 | 0.3 | 2.20E−08 | 725 |
| rs2811393 | 129506689 | T | 1 | 0.3 | 2.20E−08 | 201 |
| rs2037965 | 129507734 | C | 1 | 0.26 | 1.30E−07 | 202 |
| rs2811397 | 129509927 | C | 1 | 0.26 | 1.30E−07 | 203 |
| rs6805582 | 129511698 | A | 1 | 0.3 | 2.20E−08 | 204 |
| rs6805621 | 129511894 | T | 1 | 0.3 | 2.20E−08 | 205 |
| s.129513033 | 129513033 | A | 1 | 0.3 | 2.20E−08 | 726 |
| s.129513164 | 129513164 | T | 1 | 0.3 | 2.20E−08 | 727 |
| rs6794591 | 129513909 | T | 1 | 0.3 | 2.20E−08 | 206 |
| rs16843876 | 129515230 | G | 1 | 0.26 | 1.30E−07 | 207 |
| rs11706826 | 129515681 | T | 1 | 0.3 | 2.20E−08 | 209 |
| rs11706908 | 129515738 | A | 1 | 0.26 | 1.30E−07 | 210 |
| rs6771646 | 129517225 | G | 1 | 0.3 | 2.20E−08 | 211 |
| rs13095166 | 129519476 | T | 1 | 0.58 | 2.10E−15 | 212 |
| rs10934853 | 129521063 | A | 1 | 1 | | 1 |
| rs12486127 | 129521379 | A | 1 | 0.58 | 2.10E−15 | 214 |
| rs12486156 | 129521524 | T | 1 | 0.43 | 1.10E−11 | 215 |
| s.129524520 | 129524520 | G | 1 | 0.3 | 2.20E−08 | 728 |
| rs55925538 | 129525567 | A | 1 | 0.3 | 2.20E−08 | 729 |
| rs55989768 | 129525694 | C | 1 | 0.3 | 2.20E−08 | 730 |
| rs55675294 | 129525740 | A | 1 | 0.3 | 2.20E−08 | 731 |
| s.129526610 | 129526610 | T | 1 | 0.26 | 1.30E−07 | 732 |
| rs6772407 | 129527062 | T | 1 | 0.3 | 2.20E−08 | 217 |
| s.129529162 | 129529162 | A | 1 | 0.2 | 4.30E−06 | 733 |
| rs4857841 | 129529333 | A | 1 | 1 | 1.80E−29 | 218 |
| s.129529699 | 129529699 | C | 1 | 0.3 | 2.20E−08 | 734 |
| rs11710704 | 129529926 | A | 1 | 0.3 | 2.20E−08 | 219 |
| s.129531514 | 129531514 | T | 1 | 0.2 | 4.30E−06 | 735 |
| rs11706304 | 129533304 | G | 1 | 0.3 | 2.20E−08 | 736 |
| rs16844002 | 129536177 | T | 1 | 0.3 | 2.20E−08 | 220 |
| rs6798749 | 129539587 | A | 1 | 0.3 | 2.20E−08 | 221 |
| s.129541307 | 129541307 | T | 1 | 1 | 1.80E−29 | 737 |
| s.129541983 | 129541983 | C | 1 | 0.3 | 2.20E−08 | 738 |
| rs1735558 | 129542300 | A | 1 | 0.54 | 2.00E−14 | 222 |
| rs58986862 | 129544379 | T | 1 | 0.3 | 2.20E−08 | 739 |
| rs56850662 | 129544612 | T | 1 | 0.3 | 2.20E−08 | 740 |
| rs60399786 | 129544760 | A | 1 | 0.3 | 2.20E−08 | 741 |
| rs4857879 | 129546808 | C | 1 | 0.58 | 2.10E−15 | 223 |
| s.129548003 | 129548003 | T | 1 | 0.3 | 2.20E−08 | 742 |
| s.129548156 | 129548156 | T | 1 | 0.3 | 2.20E−08 | 743 |
| s.129548505 | 129548505 | C | 1 | 0.3 | 2.20E−08 | 744 |
| s.129549804 | 129549804 | T | 1 | 0.33 | 3.60E−09 | 745 |
| rs11709611 | 129549965 | C | 1 | 0.3 | 2.20E−08 | 746 |
| rs11721213 | 129550131 | T | 1 | 0.3 | 2.20E−08 | 224 |
| s.129552202 | 129552202 | G | 1 | 0.2 | 4.30E−06 | 747 |
| rs1735549 | 129554499 | T | 1 | 0.86 | 9.90E−24 | 225 |
| rs11711096 | 129555192 | A | 1 | 0.43 | 1.10E−11 | 748 |
| rs1735546 | 129558088 | G | 1 | 0.86 | 9.90E−24 | 226 |
| rs12632366 | 129560248 | G | 1 | 0.26 | 1.90E−10 | 227 |
| rs6785384 | 129560292 | T | 1 | 0.86 | 9.90E−24 | 749 |
| rs1735545 | 129563950 | C | 1 | 0.82 | 2.60E−22 | 228 |
| rs1702122 | 129566022 | G | 1 | 0.78 | 5.40E−21 | 229 |
| rs1108313 | 129567780 | G | 1 | 0.29 | 3.00E−11 | 230 |
| rs1735538 | 129574792 | G | 0.89 | 0.73 | 1.70E−13 | 231 |
| rs1702119 | 129577183 | C | 1 | 0.78 | 5.40E−21 | 232 |
| rs1702118 | 129577968 | G | 1 | 0.47 | 1.50E−12 | 233 |
| rs3021461 | 129578342 | C | 1 | 0.78 | 5.40E−21 | 234 |
| rs2977565 | 129578457 | A | 1 | 0.73 | 9.40E−20 | 235 |
| rs2293947 | 129580186 | C | 1 | 0.23 | 7.70E−07 | 236 |
| rs2977562 | 129588957 | G | 0.8 | 0.64 | 1.30E−11 | 750 |
| rs7373685 | 129589710 | C | 0.8 | 0.64 | 1.30E−11 | 751 |
| rs1625296 | 129590672 | A | 0.84 | 0.64 | 1.60E−11 | 752 |
| rs741925 | 129592606 | T | 1 | 0.47 | 1.50E−12 | 237 |
| rs3887841 | 129592631 | C | 0.79 | 0.6 | 5.50E−11 | 753 |
| s.129593080 | 129593080 | C | 1 | 0.47 | 1.50E−12 | 754 |
| rs729847 | 129593460 | A | 0.8 | 0.61 | 4.00E−11 | 238 |
| rs4241495 | 129593864 | C | 0.8 | 0.61 | 4.00E−11 | 755 |
| rs1620440 | 129594997 | C | 1 | 0.47 | 1.50E−12 | 240 |
| s.129596519 | 129596519 | C | 1 | 0.23 | 1.90E−09 | 756 |
| rs7632169 | 129597277 | C | 0.8 | 0.61 | 4.00E−11 | 241 |
| rs1735527 | 129598071 | G | 1 | 0.43 | 1.10E−11 | 242 |
| s.129600263 | 129600263 | A | 1 | 0.4 | 8.10E−11 | 757 |
| rs760383 | 129602255 | G | 0.78 | 0.56 | 3.80E−10 | 243 |
| rs2999031 | 129604192 | T | 1 | 0.26 | 1.90E−10 | 246 |
| rs2659685 | 129605086 | A | 0.75 | 0.56 | 3.10E−10 | 248 |
| s.129605225 | 129605225 | C | 1 | 0.2 | 4.30E−06 | 758 |
| rs1735537 | 129605510 | C | 0.75 | 0.57 | 1.60E−10 | 250 |
| rs2977564 | 129606476 | G | 1 | 0.22 | 3.40E−09 | 252 |
| rs60672471 | 129608408 | C | 1 | 0.26 | 1.30E−07 | 759 |
| s.129617004 | 129617004 | T | 1 | 0.23 | 7.70E−07 | 760 |
| s.129631956 | 129631956 | G | 1 | 0.26 | 1.30E−07 | 761 |
| rs2969249 | 129643597 | A | 1 | 0.54 | 2.00E−14 | 762 |
| s.129647692 | 129647692 | T | 1 | 0.36 | 5.50E−10 | 763 |

TABLE 18
Surrogate markers based on 1000 genome project
(http://www.1000genomes.org) to anchor marker rs16902094 on
Chromosome 8q24.2, with r² > 0.2 in Caucasians.
Shown is; Surrogate marker name, position of surrogate marker in
NCBI Build 36, the allele that is correlated with risk-allele of the
anchor marker, and D′, r², and P-values of the correlation
between the markers. Allelic codes are A = 1, C = 2, G = 3, T = 4.

| | Pos in | Risk | | | | Seq ID |
|---|---|---|---|---|---|---|
| SNP | NCBI B36 | Allele | D′ | r² | p-value | NO: |
| rs283716 | 128374349 | A | 0.69 | 0.48 | 1.20E−07 | 438 |
| rs13251915 | 128377137 | T | 0.7 | 0.29 | 3.10E−05 | 271 |
| s.128389528 | 128389528 | G | 1 | 1 | 1.70E−25 | 439 |
| s.128390158 | 128390158 | G | 1 | 1 | 1.70E−25 | 440 |
| s.128390595 | 128390595 | C | 1 | 1 | 1.70E−25 | 441 |
| s.128390665 | 128390665 | C | 1 | 1 | 1.70E−25 | 442 |
| s.128390765 | 128390765 | C | 1 | 1 | 1.70E−25 | 443 |
| s.128390866 | 128390866 | T | 1 | 1 | 1.70E−25 | 444 |
| s.128392339 | 128392339 | A | 1 | 1 | 1.70E−25 | 445 |
| s.128392802 | 128392802 | T | 1 | 0.25 | 2.90E−06 | 446 |
| s.128392906 | 128392906 | T | 1 | 1 | 1.70E−25 | 447 |
| s.128392913 | 128392913 | G | 1 | 1 | 1.70E−25 | 448 |
| s.128393073 | 128393073 | C | 1 | 0.78 | 3.50E−18 | 449 |
| s.128399692 | 128399692 | G | 1 | 0.78 | 3.50E−18 | 450 |
| s.128399737 | 128399737 | C | 1 | 0.89 | 3.00E−21 | 451 |
| s.128401223 | 128401223 | A | 1 | 0.2 | 3.60E−08 | 452 |
| s.128401569 | 128401569 | G | 1 | 1 | 1.70E−25 | 453 |
| s.128402402 | 128402402 | C | 1 | 1 | 1.70E−25 | 454 |
| s.128402747 | 128402747 | A | 1 | 1 | 1.70E−25 | 455 |
| s.128403334 | 128403334 | C | 1 | 0.2 | 3.60E−08 | 456 |
| s.128404174 | 128404174 | A | 1 | 0.2 | 3.60E−08 | 457 |
| s.128404261 | 128404261 | G | 1 | 1 | 1.70E−25 | 458 |
| s.128404718 | 128404718 | A | 1 | 1 | 1.70E−25 | 459 |
| s.128405184 | 128405184 | G | 1 | 0.38 | 4.70E−09 | 460 |
| s.128405235 | 128405235 | G | 1 | 1 | 1.70E−25 | 461 |
| s.128405846 | 128405846 | C | 1 | 1 | 1.70E−25 | 462 |
| s.128406461 | 128406461 | A | 1 | 0.76 | 6.50E−20 | 463 |
| s.128407440 | 128407440 | A | 1 | 1 | 1.70E−25 | 464 |
| s.128409306 | 128409306 | G | 1 | 1 | 1.70E−25 | 465 |
| s.128409403 | 128409403 | A | 1 | 1 | 1.70E−25 | 466 |
| rs16902103 | 128409556 | C | 1 | 1 | 1.70E−25 | 286 |
| s.128409719 | 128409719 | T | 1 | 1 | 1.70E−25 | 467 |
| s.128409736 | 128409736 | T | 1 | 1 | 1.70E−25 | 468 |
| rs16902104 | 128410090 | T | 1 | 1 | | 287 |
| s.128410992 | 128410992 | C | 1 | 0.89 | 3.00E−21 | 469 |
| s.128411248 | 128411248 | A | 0.87 | 0.36 | 7.80E−06 | 470 |
| s.128411269 | 128411269 | C | 1 | 0.38 | 4.70E−09 | 471 |
| s.128411808 | 128411808 | T | 0.94 | 0.83 | 2.90E−15 | 472 |
| rs73336742 | 128417585 | T | 0.86 | 0.61 | 3.70E−10 | 473 |
| rs16902118 | 128417799 | G | 0.86 | 0.61 | 3.70E−10 | 292 |
| s.128423946 | 128423946 | T | 1 | 0.29 | 3.60E−07 | 474 |
| rs16902121 | 128424100 | A | 0.84 | 0.51 | 2.10E−08 | 294 |
| rs73336758 | 128424416 | T | 0.85 | 0.56 | 3.00E−09 | 475 |
| rs59561127 | 128424749 | A | 0.85 | 0.56 | 3.00E−09 | 476 |
| rs73336767 | 128428048 | G | 0.85 | 0.56 | 3.00E−09 | 477 |
| rs11785277 | 128434265 | C | 0.85 | 0.56 | 3.00E−09 | 296 |
| rs11774777 | 128434381 | C | 0.85 | 0.56 | 3.00E−09 | 478 |
| s.128434384 | 128434384 | A | 0.85 | 0.56 | 3.00E−09 | 479 |
| rs11774827 | 128434523 | C | 0.84 | 0.51 | 2.10E−08 | 297 |
| rs11781774 | 128434880 | T | 0.85 | 0.56 | 3.00E−09 | 480 |
| rs35850773 | 128435129 | C | 0.85 | 0.56 | 3.00E−09 | 481 |
| rs13267256 | 128435219 | T | 0.85 | 0.56 | 3.00E−09 | 482 |
| rs13266502 | 128435227 | G | 0.85 | 0.56 | 3.00E−09 | 483 |
| s.128435347 | 128435347 | G | 0.84 | 0.51 | 2.10E−08 | 484 |
| s.128435349 | 128435349 | A | 0.84 | 0.51 | 2.10E−08 | 485 |
| rs11782693 | 128435626 | G | 0.85 | 0.56 | 3.00E−09 | 298 |
| rs11782700 | 128435678 | T | 0.84 | 0.51 | 2.10E−08 | 299 |
| rs11782735 | 128435786 | T | 0.85 | 0.56 | 3.00E−09 | 300 |
| s.128435936 | 128435936 | G | 0.85 | 0.56 | 3.00E−09 | 486 |
| rs11783559 | 128436107 | T | 0.85 | 0.56 | 3.00E−09 | 301 |
| rs11783615 | 128436189 | A | 0.85 | 0.56 | 3.00E−09 | 302 |
| rs73336790 | 128436288 | G | 0.84 | 0.51 | 2.10E−08 | 487 |
| s.128436330 | 128436330 | C | 0.76 | 0.27 | 5.10E−05 | 488 |
| rs36072021 | 128436877 | A | 0.85 | 0.56 | 3.00E−09 | 489 |
| s.128438115 | 128438115 | A | 0.85 | 0.56 | 3.00E−09 | 490 |
| rs55885383 | 128438925 | A | 0.85 | 0.56 | 3.00E−09 | 491 |
| s.128439370 | 128439370 | T | 0.85 | 0.56 | 3.00E−09 | 492 |
| s.128439371 | 128439371 | T | 0.85 | 0.56 | 3.00E−09 | 493 |
| rs56001747 | 128447992 | G | 0.85 | 0.56 | 3.00E−09 | 494 |
| rs11784125 | 128449102 | G | 0.84 | 0.51 | 2.10E−08 | 303 |
| rs11776260 | 128451670 | G | 0.78 | 0.51 | 2.00E−08 | 304 |
| rs11774907 | 128453272 | C | 0.78 | 0.51 | 2.00E−08 | 305 |
| rs16902127 | 128453599 | A | 0.78 | 0.51 | 2.00E−08 | 306 |
| s.128454871 | 128454871 | A | 0.78 | 0.51 | 2.00E−08 | 495 |
| s.128459146 | 128459146 | T | 0.79 | 0.36 | 3.10E−06 | 496 |
| rs731900 | 128459842 | A | 0.6 | 0.31 | 2.80E−05 | 308 |
| rs6982138 | 128464850 | G | 0.52 | 0.21 | 0.00029 | 497 |
| s.128468260 | 128468260 | A | 1 | 0.25 | 2.90E−06 | 498 |
| s.128468265 | 128468265 | G | 0.69 | 0.27 | 0.00011 | 499 |

TABLE 19
Surrogate markers based on 1000 genome project
(http://www.1000genomes.org) to anchor marker rs445114 on
Chromosome 8q24.21, with r² > 0.2 in Caucasians.
Shown is; Surrogate marker name, position of surrogate marker
in NCBI Build 36, the allele that is correlated with risk-allele of the
anchor marker, and D′, r², and P-values of the correlation
between the markers. Allelic codes are A = 1, C = 2, G = 3, T = 4.

| | Pos in | Risk | | | | Seq ID |
|---|---|---|---|---|---|---|
| SNP | NCBI B36 | Allele | D′ | r² | p-value | NO: |
| s.128352178 | 128352178 | G | 1 | 0.3 | 3.60E−10 | 882 |
| rs13262081 | 128353948 | G | 0.73 | 0.2 | 9.30E−05 | 883 |
| rs13280181 | 128355698 | A | 0.73 | 0.2 | 9.30E−05 | 309 |
| s.128367393 | 128367393 | T | 0.74 | 0.24 | 5.60E−05 | 884 |
| s.128368774 | 128368774 | T | 1 | 0.3 | 3.60E−10 | 885 |
| rs12679832 | 128370118 | C | 0.89 | 0.24 | 1.30E−05 | 886 |
| rs12707923 | 128370181 | C | 0.88 | 0.21 | 4.70E−05 | 310 |
| rs17378569 | 128371821 | T | 0.62 | 0.2 | 0.00012 | 887 |
| s.128373281 | 128373281 | G | 0.88 | 0.23 | 2.60E−05 | 888 |
| rs6984900 | 128373451 | T | 0.89 | 0.26 | 7.20E−06 | 311 |
| rs17450865 | 128376979 | T | 1 | 0.26 | 5.40E−09 | 312 |
| rs12549518 | 128378773 | A | 0.79 | 0.28 | 4.50E−06 | 314 |
| rs6996866 | 128379337 | T | 0.79 | 0.28 | 4.50E−06 | 315 |
| rs2007197 | 128380741 | T | 1 | 0.26 | 5.40E−09 | 316 |
| rs283727 | 128382542 | G | 0.93 | 0.4 | 3.50E−09 | 317 |
| rs283728 | 128382682 | T | 0.94 | 0.41 | 1.30E−09 | 318 |
| rs4871015 | 128383698 | G | 1 | 0.35 | 2.00E−13 | 889 |
| s.128384095 | 128384095 | A | 0.94 | 0.5 | 3.60E−11 | 890 |
| rs283704 | 128384764 | A | 1 | 0.41 | 4.40E−15 | 273 |
| rs56983490 | 128385858 | G | 0.72 | 0.22 | 2.60E−05 | 891 |
| rs283705 | 128386632 | C | 0.72 | 0.22 | 2.60E−05 | 274 |
| rs7006593 | 128386767 | T | 0.73 | 0.24 | 1.10E−05 | 892 |
| rs10107982 | 128387937 | T | 1 | 0.58 | 1.40E−18 | 321 |
| s.128390384 | 128390384 | T | 1 | 0.93 | 1.80E−30 | 893 |
| rs453875 | 128390593 | G | 0.88 | 0.69 | 1.30E−15 | 276 |
| rs445114 | 128392363 | T | 1 | 1 | 0.00E+00 | 3 |
| s.128393001 | 128393001 | C | 1 | 1 | 1.70E−34 | 894 |
| s.128393855 | 128393855 | A | 1 | 0.32 | 2.80E−12 | 895 |
| s.128394077 | 128394077 | T | 1 | 1 | 1.70E−34 | 896 |
| s.128397010 | 128397010 | A | 1 | 0.47 | 6.40E−17 | 897 |
| s.128399360 | 128399360 | T | 1 | 0.34 | 4.90E−13 | 898 |
| rs11785664 | 128399606 | C | 1 | 0.37 | 7.90E−14 | 278 |
| s.128399930 | 128399930 | A | 1 | 0.53 | 5.70E−17 | 899 |
| s.128400818 | 128400818 | C | 1 | 0.82 | 2.10E−26 | 900 |
| s.128400979 | 128400979 | A | 1 | 0.37 | 7.90E−14 | 901 |
| s.128401223 | 128401223 | G | 0.88 | 0.39 | 1.80E−08 | 452 |
| s.128401262 | 128401262 | A | 1 | 0.29 | 1.50E−11 | 902 |
| s.128401627 | 128401627 | G | 1 | 0.47 | 6.40E−17 | 903 |
| s.128401800 | 128401800 | G | 1 | 0.58 | 1.40E−18 | 904 |
| s.128402213 | 128402213 | G | 0.94 | 0.45 | 2.90E−10 | 905 |
| s.128402226 | 128402226 | T | 0.94 | 0.45 | 2.90E−10 | 906 |
| s.128402298 | 128402298 | A | 1 | 0.47 | 6.40E−17 | 907 |
| s.128402362 | 128402362 | C | 1 | 1 | 1.70E−34 | 908 |
| s.128402363 | 128402363 | G | 1 | 0.93 | 1.80E−30 | 909 |
| rs622556 | 128402379 | T | 1 | 0.47 | 6.40E−17 | 279 |
| rs452529 | 128402441 | G | 1 | 0.47 | 6.40E−17 | 280 |
| s.128402695 | 128402695 | A | 1 | 0.47 | 6.40E−17 | 910 |
| s.128403334 | 128403334 | T | 0.88 | 0.39 | 1.80E−08 | 456 |
| rs7832709 | 128403425 | A | 1 | 0.37 | 7.90E−14 | 911 |
| s.128403427 | 128403427 | A | 1 | 1 | 1.70E−34 | 912 |
| s.128403667 | 128403667 | T | 1 | 0.47 | 6.40E−17 | 913 |
| s.128403681 | 128403681 | T | 1 | 0.47 | 6.40E−17 | 914 |
| s.128403844 | 128403844 | A | 1 | 0.47 | 6.40E−17 | 915 |
| rs13256367 | 128404082 | A | 1 | 1 | 1.70E−34 | 327 |
| s.128404093 | 128404093 | G | 1 | 0.47 | 6.40E−17 | 916 |
| rs594076 | 128404148 | G | 1 | 0.47 | 6.40E−17 | 917 |
| s.128404174 | 128404174 | C | 0.88 | 0.39 | 1.80E−08 | 457 |
| rs437980 | 128404428 | A | 1 | 0.47 | 6.40E−17 | 918 |
| s.128404708 | 128404708 | C | 1 | 0.64 | 2.80E−20 | 919 |
| rs620861 | 128404855 | G | 1 | 1 | 1.70E−34 | 920 |
| rs620808 | 128404896 | C | 0.94 | 0.45 | 2.90E−10 | 921 |
| s.128404897 | 128404897 | A | 1 | 0.47 | 6.40E−17 | 922 |
| rs443053 | 128404978 | G | 1 | 1 | 1.70E−34 | 923 |
| s.128405181 | 128405181 | T | 1 | 0.28 | 1.40E−09 | 924 |
| rs11775799 | 128405418 | G | 1 | 0.37 | 7.90E−14 | 925 |
| rs400818 | 128405728 | T | 1 | 0.47 | 6.40E−17 | 281 |
| s.128405922 | 128405922 | A | 1 | 0.47 | 6.40E−17 | 926 |
| s.128405923 | 128405923 | C | 1 | 0.47 | 6.40E−17 | 927 |
| s.128405926 | 128405926 | G | 1 | 0.47 | 6.40E−17 | 928 |
| rs386883 | 128406053 | G | 1 | 0.47 | 6.40E−17 | 282 |
| rs377649 | 128406423 | G | 1 | 0.47 | 6.40E−17 | 283 |
| s.128406460 | 128406460 | C | 1 | 0.96 | 3.50E−32 | 929 |
| s.128407109 | 128407109 | A | 1 | 0.47 | 6.40E−17 | 930 |
| s.128407776 | 128407776 | G | 1 | 0.47 | 6.40E−17 | 931 |
| s.128407875 | 128407875 | G | 1 | 0.47 | 6.40E−17 | 932 |
| s.128407884 | 128407884 | C | 1 | 0.93 | 1.80E−30 | 933 |
| s.128407942 | 128407942 | G | 1 | 0.47 | 6.40E−17 | 934 |
| s.128408029 | 128408029 | G | 1 | 0.47 | 6.40E−17 | 935 |
| rs432470 | 128408226 | C | 1 | 0.39 | 1.20E−14 | 284 |
| rs424281 | 128408608 | G | 1 | 0.39 | 1.20E−14 | 285 |
| rs1668875 | 128410285 | G | 1 | 0.83 | 1.60E−27 | 288 |
| rs7002712 | 128410794 | T | 1 | 0.38 | 3.10E−14 | 289 |
| rs587948 | 128410862 | T | 0.92 | 0.75 | 1.30E−17 | 290 |
| rs623401 | 128410909 | C | 0.92 | 0.75 | 1.30E−17 | 291 |
| s.128411296 | 128411296 | C | 1 | 0.93 | 1.80E−30 | 936 |
| rs10956359 | 128411336 | T | 1 | 0.58 | 1.40E−18 | 341 |
| rs17464492 | 128412048 | A | 1 | 0.58 | 1.40E−18 | 342 |
| s.128412523 | 128412523 | G | 0.79 | 0.21 | 0.00012 | 937 |
| rs420101 | 128413061 | G | 0.9 | 0.57 | 3.40E−13 | 343 |
| rs7838714 | 128413130 | C | 1 | 0.34 | 4.90E−13 | 344 |
| rs389143 | 128413562 | C | 0.9 | 0.57 | 3.40E−13 | 345 |
| rs688201 | 128413584 | G | 0.9 | 0.57 | 3.40E−13 | 346 |
| s.128413592 | 128413592 | G | 0.9 | 0.57 | 3.40E−13 | 938 |
| rs687324 | 128413773 | T | 0.9 | 0.57 | 3.40E−13 | 347 |
| s.128413783 | 128413783 | T | 0.9 | 0.57 | 3.40E−13 | 939 |
| s.128413784 | 128413784 | G | 0.9 | 0.57 | 3.40E−13 | 940 |
| rs687279 | 128413806 | C | 0.6 | 0.32 | 4.40E−07 | 348 |
| rs436238 | 128414210 | C | 0.9 | 0.57 | 3.40E−13 | 349 |
| rs581761 | 128414413 | G | 0.9 | 0.57 | 3.40E−13 | 350 |
| rs673745 | 128414451 | C | 0.9 | 0.57 | 3.40E−13 | 351 |
| rs688937 | 128414563 | T | 0.9 | 0.57 | 3.40E−13 | 352 |
| rs672888 | 128414645 | A | 0.9 | 0.57 | 3.40E−13 | 353 |
| rs7826557 | 128414913 | A | 1 | 0.34 | 4.90E−13 | 354 |
| s.128415441 | 128415441 | A | 0.9 | 0.57 | 3.40E−13 | 941 |
| rs418269 | 128415540 | G | 0.9 | 0.57 | 3.40E−13 | 355 |
| s.128415799 | 128415799 | A | 0.75 | 0.33 | 6.30E−07 | 942 |
| rs385278 | 128416199 | T | 0.9 | 0.57 | 3.40E−13 | 356 |
| rs391640 | 128416306 | A | 0.75 | 0.33 | 6.30E−07 | 357 |
| rs670725 | 128416339 | A | 0.9 | 0.57 | 3.40E−13 | 358 |
| rs382824 | 128416906 | T | 0.91 | 0.7 | 7.50E−16 | 359 |
| rs383205 | 128417159 | G | 0.9 | 0.57 | 3.40E−13 | 360 |
| rs373616 | 128417244 | T | 0.9 | 0.57 | 3.40E−13 | 361 |
| rs400772 | 128417480 | G | 0.9 | 0.57 | 3.40E−13 | 943 |
| s.128418616 | 128418616 | C | 1 | 0.24 | 2.00E−08 | 944 |
| rs13275275 | 128418909 | A | 0.9 | 0.57 | 3.40E−13 | 362 |
| rs13248140 | 128419070 | G | 0.91 | 0.59 | 7.70E−14 | 363 |
| s.128419152 | 128419152 | G | 0.9 | 0.57 | 3.40E−13 | 945 |
| rs10956361 | 128419288 | G | 0.9 | 0.57 | 3.40E−13 | 364 |
| rs10956362 | 128419568 | A | 0.9 | 0.57 | 3.40E−13 | 365 |
| rs13249993 | 128419697 | G | 1 | 0.37 | 7.90E−14 | 366 |
| rs11777532 | 128419790 | C | 1 | 0.3 | 6.50E−12 | 367 |
| s.128420230 | 128420230 | A | 0.9 | 0.57 | 3.40E−13 | 946 |
| s.128420624 | 128420624 | A | 0.9 | 0.52 | 2.60E−12 | 947 |
| rs10956363 | 128420955 | G | 0.9 | 0.57 | 3.40E−13 | 368 |
| s.128421136 | 128421136 | C | 0.6 | 0.32 | 4.40E−07 | 948 |
| s.128421387 | 128421387 | T | 0.73 | 0.37 | 6.80E−08 | 949 |
| rs4871782 | 128421416 | G | 0.9 | 0.57 | 3.40E−13 | 369 |
| s.128421545 | 128421545 | G | 0.6 | 0.32 | 4.40E−07 | 950 |
| rs10087810 | 128421912 | T | 0.9 | 0.52 | 2.60E−12 | 370 |
| rs12541832 | 128422353 | C | 0.6 | 0.32 | 4.40E−07 | 371 |
| rs13262406 | 128422921 | A | 0.6 | 0.32 | 4.40E−07 | 372 |
| rs17465052 | 128423262 | A | 1 | 0.3 | 6.50E−12 | 951 |
| s.128423268 | 128423268 | A | 0.6 | 0.32 | 4.40E−07 | 952 |
| rs10098985 | 128424201 | T | 1 | 0.34 | 4.90E−13 | 373 |
| rs13281615 | 128424800 | A | 0.83 | 0.59 | 7.90E−13 | 374 |
| rs17465283 | 128425006 | A | 1 | 0.34 | 4.90E−13 | 953 |
| s.128425122 | 128425122 | A | 0.9 | 0.5 | 9.70E−12 | 954 |
| rs13256275 | 128425408 | G | 0.87 | 0.37 | 5.00E−08 | 295 |
| rs17465317 | 128425852 | C | 1 | 0.37 | 7.90E−14 | 955 |
| rs55746746 | 128426042 | T | 1 | 0.34 | 4.90E−13 | 956 |
| rs13267780 | 128426999 | G | 0.81 | 0.38 | 8.80E−08 | 376 |
| rs10447995 | 128427106 | G | 1 | 0.37 | 7.90E−14 | 377 |
| rs6999578 | 128427977 | T | 1 | 0.33 | 1.20E−12 | 957 |
| rs7014657 | 128430423 | G | 1 | 0.34 | 4.90E−13 | 378 |
| rs56110209 | 128431110 | G | 1 | 0.34 | 4.90E−13 | 958 |
| s.128432549 | 128432549 | G | 0.92 | 0.3 | 5.80E−07 | 959 |
| rs10097200 | 128432834 | C | 0.92 | 0.3 | 5.80E−07 | 960 |
| rs7002826 | 128433453 | C | 0.92 | 0.3 | 5.80E−07 | 379 |
| rs7007568 | 128434088 | C | 0.92 | 0.3 | 5.80E−07 | 380 |
| rs7842494 | 128435752 | A | 0.92 | 0.3 | 5.80E−07 | 381 |
| rs5022926 | 128436011 | C | 0.92 | 0.3 | 5.80E−07 | 382 |
| rs10112674 | 128436636 | T | 0.93 | 0.4 | 7.00E−09 | 961 |
| rs9693995 | 128437695 | T | 1 | 0.33 | 1.20E−12 | 383 |
| s.128439155 | 128439155 | G | 0.86 | 0.58 | 1.30E−12 | 962 |
| s.128439365 | 128439365 | G | 0.72 | 0.4 | 6.40E−09 | 963 |
| s.128439453 | 128439453 | G | 0.86 | 0.58 | 1.30E−12 | 964 |
| s.128439937 | 128439937 | G | 0.72 | 0.4 | 6.40E−09 | 965 |
| s.128440131 | 128440131 | C | 0.85 | 0.47 | 1.60E−10 | 966 |
| rs10096351 | 128441354 | A | 1 | 0.34 | 4.90E−13 | 967 |
| rs2121629 | 128442209 | T | 0.9 | 0.5 | 9.70E−12 | 384 |
| rs12541305 | 128442938 | C | 1 | 0.3 | 6.50E−12 | 968 |
| rs978683 | 128443299 | G | 0.86 | 0.58 | 1.30E−12 | 385 |
| rs9297753 | 128444452 | T | 1 | 0.34 | 4.90E−13 | 969 |
| rs9283954 | 128444552 | T | 1 | 0.32 | 2.80E−12 | 386 |
| rs7831303 | 128445914 | A | 1 | 0.33 | 1.20E−12 | 387 |
| rs7815100 | 128445983 | C | 0.92 | 0.3 | 5.80E−07 | 388 |
| rs7835046 | 128446108 | T | 0.69 | 0.35 | 1.60E−07 | 970 |
| rs4143118 | 128446650 | G | 0.85 | 0.47 | 1.60E−10 | 389 |
| rs6988647 | 128446838 | C | 0.92 | 0.3 | 5.80E−07 | 390 |
| rs7006882 | 128446849 | T | 0.85 | 0.47 | 1.60E−10 | 971 |
| rs9692890 | 128446956 | A | 1 | 0.34 | 4.90E−13 | 972 |
| rs9693143 | 128447207 | T | 0.92 | 0.3 | 5.80E−07 | 391 |
| rs28524866 | 128447373 | C | 0.85 | 0.47 | 1.60E−10 | 973 |
| rs10956364 | 128448065 | T | 0.85 | 0.49 | 4.50E−11 | 393 |
| rs11776330 | 128448145 | T | 0.85 | 0.49 | 4.50E−11 | 394 |
| rs7845452 | 128448591 | C | 1 | 0.34 | 4.90E−13 | 395 |
| rs16902126 | 128451539 | G | 0.84 | 0.26 | 8.10E−06 | 974 |
| rs7815245 | 128452779 | T | 0.92 | 0.3 | 5.80E−07 | 396 |
| rs1562430 | 128457034 | C | 0.92 | 0.3 | 5.80E−07 | 398 |
| rs2392780 | 128457207 | G | 0.92 | 0.3 | 5.80E−07 | 399 |
| rs7015780 | 128458689 | T | 1 | 0.32 | 2.80E−12 | 307 |
| s.128460594 | 128460594 | T | 0.75 | 0.34 | 2.10E−06 | 975 |
| s.128462414 | 128462414 | C | 0.65 | 0.4 | 3.20E−08 | 976 |
| s.128463670 | 128463670 | A | 0.54 | 0.23 | 0.00032 | 977 |
| s.128464690 | 128464690 | T | 0.64 | 0.28 | 4.20E−05 | 978 |

TABLE 20
Surrogate markers based on 1000 genome project
(http://www.1000genomes.org) to anchor marker rs8102476 on
Chromosome 19q13.2, with r² > 0.2 in Caucasians. Shown
is; Surrogate marker name, position of surrogate marker in NCBI
Build 36, the allele that is correlated with risk-allele of the anchor
marker, and D′, r², and P-values of the correlation between
the markers. Allelic codes are A = 1, C = 2, G = 3, T = 4.

| | Pos in | Risk | | | | Seq ID |
|---|---|---|---|---|---|---|
| SNP | NCBI B36 | Allele | D′ | r² | p-value | NO: |
| rs8108765 | 43169695 | A | 0.67 | 0.23 | 4.10E−05 | 764 |
| rs8110367 | 43170305 | T | 0.68 | 0.25 | 2.70E−05 | 401 |
| s.43174267 | 43174267 | G | 0.68 | 0.25 | 2.70E−05 | 765 |
| rs59255647 | 43182371 | T | 0.68 | 0.25 | 2.70E−05 | 766 |
| s.43183445 | 43183445 | T | 0.57 | 0.21 | 5.40E−05 | 767 |
| s.43183844 | 43183844 | A | 0.68 | 0.25 | 2.70E−05 | 768 |
| rs8113568 | 43185050 | T | 0.68 | 0.25 | 2.70E−05 | 769 |
| rs10500278 | 43186344 | G | 0.68 | 0.25 | 2.70E−05 | 402 |
| rs12460657 | 43187837 | C | 0.68 | 0.25 | 2.70E−05 | 770 |
| rs56321312 | 43189293 | C | 0.68 | 0.25 | 2.70E−05 | 771 |
| s.43191209 | 43191209 | A | 0.68 | 0.25 | 2.70E−05 | 772 |
| s.43191727 | 43191727 | T | 0.68 | 0.25 | 2.70E−05 | 773 |
| s.43205052 | 43205052 | G | 0.79 | 0.31 | 3.30E−06 | 774 |
| rs705503 | 43206158 | C | 0.55 | 0.22 | 5.70E−05 | 403 |
| rs1725516 | 43225848 | A | 0.63 | 0.2 | 0.00075 | 775 |
| rs1725517 | 43225864 | T | 0.63 | 0.2 | 0.00075 | 776 |
| rs1725518 | 43225875 | C | 0.63 | 0.2 | 0.00075 | 777 |
| rs1623976 | 43226317 | A | 0.63 | 0.2 | 0.00075 | 778 |
| rs1628394 | 43226848 | G | 0.63 | 0.2 | 0.00075 | 779 |
| rs7256656 | 43227905 | T | 0.63 | 0.2 | 0.00075 | 780 |
| rs1654338 | 43228193 | G | 0.63 | 0.2 | 0.00075 | 404 |
| s.43228365 | 43228365 | G | 0.63 | 0.2 | 0.00075 | 781 |
| rs6508759 | 43229065 | A | 0.63 | 0.2 | 0.00075 | 782 |
| rs1654339 | 43230639 | A | 0.63 | 0.2 | 0.00075 | 783 |
| rs1654340 | 43231546 | G | 0.63 | 0.2 | 0.00075 | 784 |
| rs1725459 | 43231572 | C | 0.63 | 0.2 | 0.00075 | 785 |
| rs734204 | 43231828 | A | 0.63 | 0.2 | 0.00075 | 786 |
| rs1725460 | 43232252 | T | 0.65 | 0.22 | 0.00028 | 787 |
| rs1616705 | 43233433 | A | 0.63 | 0.2 | 0.00075 | 788 |
| rs1725463 | 43233530 | T | 0.65 | 0.22 | 0.00028 | 789 |
| rs1620082 | 43233843 | A | 0.65 | 0.22 | 0.00028 | 790 |
| rs1725464 | 43234107 | A | 0.65 | 0.22 | 0.00028 | 791 |
| rs1618385 | 43234734 | C | 0.65 | 0.22 | 0.00028 | 792 |
| s.43234917 | 43234917 | G | 0.65 | 0.22 | 0.00028 | 793 |
| rs7249241 | 43235302 | T | 0.65 | 0.22 | 0.00028 | 794 |
| rs941036 | 43235335 | T | 0.65 | 0.22 | 0.00028 | 795 |
| rs941037 | 43235466 | C | 0.65 | 0.22 | 0.00028 | 796 |
| rs1725467 | 43235743 | A | 0.65 | 0.22 | 0.00028 | 797 |
| rs5022085 | 43236807 | A | 0.65 | 0.22 | 0.00028 | 798 |
| rs5022086 | 43236812 | A | 0.63 | 0.2 | 0.00075 | 799 |
| rs7256480 | 43236873 | C | 0.65 | 0.22 | 0.00028 | 800 |
| rs6508762 | 43236899 | C | 0.65 | 0.22 | 0.00028 | 801 |
| rs7256804 | 43236943 | G | 0.65 | 0.22 | 0.00028 | 802 |
| rs7256626 | 43237078 | A | 0.65 | 0.22 | 0.00028 | 803 |
| rs10421137 | 43237400 | C | 0.65 | 0.22 | 0.00028 | 804 |
| rs1654344 | 43237994 | C | 0.65 | 0.22 | 0.00028 | 805 |
| s.43237998 | 43237998 | C | 0.65 | 0.22 | 0.00028 | 806 |
| s.43318850 | 43318850 | G | 0.88 | 0.22 | 8.30E−05 | 807 |
| rs2005055 | 43318978 | A | 0.88 | 0.21 | 0.0001 | 808 |
| rs8103692 | 43416870 | C | 1 | 0.63 | 9.60E−22 | 809 |
| rs12610482 | 43417256 | T | 1 | 0.3 | 5.10E−11 | 810 |
| rs10409427 | 43417387 | A | 0.95 | 0.64 | 3.40E−14 | 811 |
| s.43417699 | 43417699 | T | 0.91 | 0.65 | 2.50E−14 | 812 |
| rs7253820 | 43417916 | A | 0.91 | 0.63 | 1.60E−13 | 813 |
| rs4803899 | 43419480 | A | 0.91 | 0.63 | 1.60E−13 | 405 |
| rs7246060 | 43423502 | G | 0.92 | 0.74 | 1.10E−16 | 407 |
| s.43425293 | 43425293 | G | 1 | 0.62 | 3.40E−21 | 814 |
| s.43425483 | 43425483 | G | 1 | 0.47 | 1.90E−16 | 815 |
| rs8102454 | 43427320 | G | 1 | 0.97 | 5.40E−34 | 816 |
| s.43427426 | 43427426 | G | 1 | 0.3 | 5.10E−11 | 817 |
| rs8102476 | 43427453 | C | 1 | | | 4 |
| s.43427644 | 43427644 | A | 1 | 0.9 | 4.90E−31 | 818 |
| s.43428325 | 43428325 | G | 1 | 0.28 | 1.50E−10 | 819 |
| s.43429472 | 43429472 | G | 1 | 0.21 | 3.00E−08 | 820 |
| s.43429970 | 43429970 | G | 1 | 0.56 | 4.80E−19 | 821 |
| s.43432176 | 43432176 | G | 1 | 0.21 | 3.00E−08 | 822 |
| s.43432765 | 43432765 | C | 1 | 1 | 3.60E−36 | 823 |
| s.43435211 | 43435211 | C | 1 | 0.21 | 3.00E−08 | 824 |
| rs12976534 | 43435802 | A | 0.96 | 0.86 | 1.20E−20 | 409 |
| s.43436225 | 43436225 | T | 1 | 0.21 | 3.00E−08 | 825 |
| rs12610267 | 43436573 | A | 1 | 0.9 | 4.90E−31 | 826 |
| s.43437877 | 43437877 | T | 1 | 0.22 | 1.10E−08 | 827 |
| rs4803934 | 43438407 | C | 1 | 0.87 | 8.30E−30 | 410 |
| rs11668070 | 43440753 | G | 1 | 0.93 | 2.10E−32 | 411 |
| s.43441169 | 43441169 | T | 1 | 0.33 | 5.10E−12 | 828 |
| s.43441174 | 43441174 | T | 1 | 0.33 | 5.10E−12 | 829 |
| s.43441940 | 43441940 | G | 1 | 0.93 | 2.10E−32 | 830 |
| s.43443415 | 43443415 | G | 1 | 0.28 | 1.50E−10 | 831 |
| rs7250689 | 43445465 | T | 1 | 0.9 | 4.90E−31 | 412 |
| s.43446079 | 43446079 | T | 1 | 0.81 | 1.20E−27 | 832 |
| rs3786872 | 43447929 | C | 1 | 0.33 | 5.10E−12 | 415 |
| rs58711382 | 43449980 | A | 0.59 | 0.22 | 0.0011 | 833 |
| rs3786877 | 43451020 | T | 0.82 | 0.5 | 1.10E−10 | 416 |
| s.43451244 | 43451244 | C | 1 | 0.33 | 5.10E−12 | 834 |
| s.43452410 | 43452410 | G | 1 | 0.51 | 1.00E−17 | 835 |
| s.43452458 | 43452458 | G | 1 | 0.31 | 1.10E−11 | 836 |
| rs10408768 | 43452532 | A | 0.69 | 0.26 | 1.40E−05 | 837 |
| s.43453573 | 43453573 | C | 0.86 | 0.54 | 1.10E−11 | 838 |
| s.43453577 | 43453577 | T | 1 | 0.22 | 1.10E−08 | 839 |
| rs10048529 | 43454845 | G | 0.82 | 0.5 | 1.10E−10 | 840 |
| rs8101725 | 43456912 | C | 0.82 | 0.5 | 1.10E−10 | 418 |
| s.43457500 | 43457500 | C | 0.82 | 0.5 | 1.10E−10 | 841 |
| s.43457897 | 43457897 | T | 0.75 | 0.29 | 1.50E−06 | 842 |
| s.43458212 | 43458212 | A | 1 | 0.22 | 1.10E−08 | 843 |
| s.43458950 | 43458950 | T | 0.82 | 0.5 | 1.10E−10 | 844 |
| s.43461834 | 43461834 | T | 0.82 | 0.5 | 1.10E−10 | 845 |
| rs12611009 | 43464321 | T | 0.82 | 0.5 | 1.10E−10 | 420 |
| rs3826896 | 43465362 | T | 0.82 | 0.5 | 1.10E−10 | 421 |
| rs2060243 | 43465806 | A | 0.82 | 0.5 | 1.10E−10 | 846 |
| s.43468987 | 43468987 | T | 0.81 | 0.48 | 2.70E−10 | 847 |
| s.43469211 | 43469211 | T | 0.82 | 0.5 | 1.10E−10 | 848 |
| rs8100926 | 43469277 | G | 0.82 | 0.5 | 1.10E−10 | 849 |
| s.43469566 | 43469566 | T | 0.82 | 0.5 | 1.10E−10 | 850 |
| s.43469919 | 43469919 | T | 0.82 | 0.5 | 1.10E−10 | 851 |
| s.43470755 | 43470755 | A | 0.55 | 0.28 | 4.60E−06 | 852 |
| rs1821284 | 43475421 | C | 0.75 | 0.29 | 1.50E−06 | 423 |
| rs4802324 | 43476934 | C | 0.75 | 0.29 | 1.50E−06 | 853 |
| s.43479805 | 43479805 | A | 0.75 | 0.29 | 1.50E−06 | 854 |
| s.43482475 | 43482475 | A | 0.75 | 0.29 | 1.50E−06 | 855 |
| rs4312417 | 43489029 | A | 0.7 | 0.2 | 7.60E−05 | 428 |
| rs3178327 | 43489926 | T | 0.7 | 0.2 | 7.60E−05 | 429 |
| rs3900981 | 43492005 | C | 0.9 | 0.24 | 3.60E−06 | 430 |
| s.43495536 | 43495536 | G | 0.9 | 0.24 | 3.60E−06 | 856 |
| rs11881305 | 43496058 | A | 0.7 | 0.2 | 7.60E−05 | 857 |
| s.43498612 | 43498612 | A | 0.7 | 0.2 | 7.60E−05 | 858 |
| rs3843754 | 43499024 | G | 0.7 | 0.2 | 7.60E−05 | 431 |
| s.43500344 | 43500344 | A | 0.7 | 0.2 | 7.60E−05 | 859 |
| s.43500345 | 43500345 | A | 0.7 | 0.2 | 7.60E−05 | 860 |
| s.43500352 | 43500352 | A | 0.76 | 0.23 | 1.50E−05 | 861 |
| s.43507057 | 43507057 | G | 0.65 | 0.22 | 0.00048 | 862 |
| s.43547186 | 43547186 | G | 0.9 | 0.25 | 5.00E−06 | 863 |
| rs1052375 | 43553173 | A | 0.63 | 0.37 | 5.30E−07 | 433 |
| s.43569837 | 43569837 | T | 0.79 | 0.3 | 7.90E−06 | 864 |
| s.43606416 | 43606416 | A | 1 | 0.22 | 9.30E−09 | 865 |
| rs4801752 | 43619801 | A | 0.53 | 0.23 | 9.90E−05 | 866 |
| s.43622138 | 43622138 | T | 0.53 | 0.23 | 9.90E−05 | 867 |
| rs892053 | 43624226 | C | 0.59 | 0.21 | 0.00015 | 868 |
| rs2229139 | 43627120 | G | 0.52 | 0.21 | 0.00016 | 869 |
| s.43627475 | 43627475 | A | 0.52 | 0.21 | 0.00016 | 870 |
| rs10407327 | 43627788 | T | 0.52 | 0.21 | 0.00016 | 871 |
| rs11083457 | 43628191 | G | 0.52 | 0.21 | 0.00016 | 872 |
| s.43628334 | 43628334 | G | 0.52 | 0.21 | 0.00016 | 873 |
| rs7249795 | 43628493 | C | 0.52 | 0.21 | 0.00016 | 874 |
| rs7254048 | 43628643 | A | 0.52 | 0.21 | 0.00016 | 875 |
| rs7253151 | 43628676 | T | 0.52 | 0.21 | 0.00016 | 876 |
| s.43633484 | 43633484 | G | 0.51 | 0.23 | 0.0001 | 877 |
| rs8104269 | 43637242 | G | 0.52 | 0.21 | 0.00016 | 878 |
| s.43640260 | 43640260 | G | 1 | 0.32 | 3.80E−12 | 879 |
| rs2304147 | 43642787 | T | 0.54 | 0.21 | 0.00026 | 880 |
| rs2304150 | 43647423 | G | 0.55 | 0.23 | 0.00017 | 437 |
| s.43729257 | 43729257 | C | 0.55 | 0.27 | 4.90E−05 | 881 |

1. A method of determining a susceptibility to prostate cancer, the method comprising:
analyzing nucleic acid sequence data from a human individual for at least one allele of at least one polymorphic marker selected from the group consisting of rs16902094, rs8102476, rs10934853 and rs445114, and markers in linkage disequilibirium therewith; wherein different alleles of the at least one polymorphic marker are associated with different susceptibilities to prostate cancer in humans, and
determining a susceptibility to prostate cancer from the nucleic acid sequence data.

2. The method of claim 1, further comprising:
obtaining the nucleic acid sequence data from a biological sample containing nucleic acid from the human individual, prior to the analyzing.

3. The method of claim 2, wherein the obtaining of the nucleic acid sequence data comprises a method that includes at least one procedure selected from amplifying nucleic acid from the biological sample; and performing a hybridization assay using a nucleic acid probe and nucleic acid from the biological sample, or from the amplifying.

4. A method of determining nucleic acid sequence data indicative of a susceptibility to prostate cancer, the method comprising:
analyzing nucleic acid from a human individual to obtain nucleic acid data for at least one allele of at least one polymorphic marker selected from the group consisting of rs16902094, rs8102476, rs10934853 and rs445114, and markers in linkage disequilibirium therewith; wherein different alleles of the at least one polymorphic marker are associated with different susceptibilities to prostate cancer in humans, and
preparing a report containing the nucleic acid sequence data for said at least one allele of the at least one polymorphic marker, wherein said report is written in a computer readable medium, printed on paper, or displayed on a visual display.

5. (canceled)

6. A method for determining a susceptibility to prostate cancer in a human individual, comprising:
determining the presence or absence of at least one allele of at least one polymorphic marker in a nucleic acid sample obtained from the individual, or in a genotype dataset from the individual, wherein the at least one polymorphic marker is selected from the group consisting of rs16902094, rs8102476, rs10934853 and rs445114, and markers in linkage disequilibrium therewith, and wherein determination of the presence of the at least one allele is indicative of a susceptibility to prostate cancer.

7. The method of claim 6, wherein the determining comprises analyzing nucleic acid in the sample using a method that includes at least one procedure selected from amplifying nucleic acid from the nucleic acid sample; and performing a hybridization assay using a nucleic acid probe and nucleic acid from the nucleic acid sample, or from the amplifying.

8. The method of claim 1, further comprising displaying the susceptibility to prostate cancer on a visual display selected from the group consisting of an electronic display and a printed report.

9. The method of claim 1, further comprising recording the susceptibility to prostate cancer on a computer readable medium.

10. (canceled)

11. (canceled)

12. The method of claim 1, comprising analyzing nucleic acid sequence data from the human individual for at least one allele of at least two of said polymorphic markers, wherein different haplotypes comprising alleles of the at least two polymorphic markers are associated with different susceptibilities to prostate cancer in humans.

13. The method of claim 4, comprising analyzing the nucleic acid to obtain nucleic acid sequence data for at least one allele of at least two of said polymorphic markers, wherein different haplotypes comprising alleles of the at least two polymorphic markers are associated with different susceptibilities to prostate cancer in humans.

14. The method of claim 6, comprising determining the presence or absence of at least one allele of at least two of said polymorphic markers in the nucleic acid sample, wherein different haplotypes comprising alleles of the at least two polymorphic markers are associated with different susceptibilities to prostate cancer in humans.

15. The method of claim 1, wherein determining of a susceptibility comprises comparing the nucleic acid sequence data to a database containing correlation data between the at least one polymorphic marker and susceptibility to prostate cancer.

16. The method of claim 15, wherein the database comprises at least one risk measure of susceptibility to prostate cancer for the at least one polymorphic marker.

17. The method of claim 15, wherein the database comprises a look-up table containing at least one risk measure of prostate cancer for the at least one polymorphic marker.

18. The method of claim 1, further comprising obtaining a biological sample from the human individual, and determining sequence of the at least one allele of the at least one polymorphic marker in nucleic acid from the sample.

19. The method of claim 1, wherein the nucleic acid sequence data is obtained from a preexisting record.

20. The method of claim 6, wherein the determining is based on a genotype dataset from a preexisting record.

21. The method of claim 1, wherein markers in linkage disequilibrium with rs8102476 are selected from the group consisting of the markers listed in Table 11 and Table 20.

22. The method of claim 21, wherein markers in linkage disequilibrium with rs8102476 are selected from the group consisting of the markers listed in Table 16.

23. The method of claim 1, wherein markers in linkage disequilibrium with rs10934853 are selected from the group consisting of the markers listed in Table 8 and Table 17.

24. The method of claim 23, wherein markers in linkage disequilibrium with rs10934853 are selected from the group consisting of the markers listed in Table 13.

25. The method of claim 1, wherein markers in linkage disequilibrium with rs16902094 are selected from the group consisting of the markers listed in Table 9 and Table 18.

26. The method of claim 25, wherein markers in linkage disequilibrium with rs16902094 are selected from the group consisting of the markers listed in Table 15.

27. The method of claim 1, wherein markers in linkage disequilibrium with rs445114 are selected from the group consisting of the markers listed in Table 10 and Table 19.

28. The method of claim 27, wherein markers in linkage disequilibrium with rs445114 are selected from the group consisting of the markers listed in Table 14.

29. The method of claim 1, wherein the at least one polymorphic marker is selected from the group consisting of rs16902094, rs8102476, rs10934853, rs445114, rs16902104, and rs620861.

30. The method of claim 1, wherein the susceptibility is increased susceptibility.

31. The method of claim 30, wherein the presence of the at least one allele or haplotype is indicative of increased susceptibility with a relative risk of at least 1.08.

32. The method of claim 29, wherein determination of the presence of allele G in rs16902094, allele C in rs8102476, allele A in rs10934853, allele T in rs445114, allele G in rs620861 or allele T in rs16902104 is indicative of increased susceptibility of prostate cancer.

33. The method of claim 30, further comprising administering to the human individual a standard of care therapeutic for prostate health.

34. The method of claim 1, further comprising reporting the susceptibility to at least one entity selected from the group consisting of the individual, a guardian of the individual, a genetic service provider, a physician, a medical organization, and a medical insurer.

35. The method of claim 1, wherein the individual is of an ancestry that includes Caucasian ancestry.

36. The method of claim 1, further comprising assessing the presence or absence of at least one additional genetic risk factor for prostate cancer in the individual.

37. The method of claim 36, wherein the additional genetic risk factor for prostate cancer is selected from the group consisting of rs2710646 allele A, rs2660753 allele T, rs401681 allele C, rs9364554 allele T, rs10486567 allele G, rs6465657 allele C, rs1447295 allele A, rs16901979 allele A, rs6983267 allele G, rs1571801 allele A, rs10993994 allele T, rs4962416 allele C, rs10896450 allele G, rs4430796 allele A, rs11649743 allele G, rs1859962 allele G, rs2735839 allele G, rs9623117 allele C, rs5945572 allele Ars7127900 allele A, rs10896449 allele G, rs8102476 allele C, rs5759167 allele G, rs10207654 allele A, rs7679673 allele C, rs1512268 allele A, rs10505483 allele A, and rs10086908 allele T.

38. A method of identification of a marker for use in assessing susceptibility to prostate cancer, the method comprising
a. identifying at least one polymorphic marker in linkage disequilibrium with at least one marker selected from the group consisting of rs16902094, rs8102476, rs10934853 and rs445114;
b. obtaining nucleic acid sequence data about a plurality of human individuals diagnosed with prostate cancer, and a plurality of control individuals, determining the presence or absence at least one allele of the at the least one polymorphic marker in the nucleic acid sequence data; and
c. determining the difference in frequency of the at least one allele between the individuals diagnosed with prostate cancer and the control group;
wherein determination of a significant difference in frequency of the at least one allele is indicative of the at least one marker being useful for assessing susceptibility to prostate cancer.

39. The method of claim 38, wherein an increase in frequency of the at least one allele in the at least one polymorphism in individuals diagnosed with prostate cancer, as compared with the frequency of the at least one allele in the control group is indicative of the at least one allele being useful for assessing increased susceptibility to prostate cancer.

40. The method of claim 38, wherein a decrease in frequency of the at least one allele in the at least one polymorphism in individuals diagnosed with prostate cancer, as compared with the frequency of the at least one allele in the control sample is indicative of the at least one allele being useful for assessing decreased susceptibility to, or protection against, prostate cancer.

41. The method of claim 38, further comprising reporting the susceptibility to prostate cancer for the marker in linkage disequilibrium on a visual display, or recording the susceptibility in a computer-readable medium or printed report.

42.-55. (canceled)

56. A computer-readable medium having computer executable instructions for determining susceptibility to prostate cancer, the computer readable medium comprising:
a. data identifying at least one allele of at least one polymorphic marker for at least one human subject;
b. a routine stored on the computer readable medium and adapted to be executed by a processor to determine risk of developing prostate cancer for the at least one polymorphic marker for the subject;
wherein the at least one polymorphic marker is selected from the group consisting of rs16902094, rs8102476, rs10934853 and rs445114, and markers in linkage disequilibrium therewith.

57. An apparatus for determining a genetic indicator for prostate cancer in a human individual, comprising:
a processor
a computer readable memory having computer executable instructions adapted to be executed on the processor to analyze marker and/or haplotype information for at least one human individual with respect to at least one polymorphic marker selected from the group consisting of rs16902094, rs8102476, rs10934853 and rs445114, and markers in linkage disequilibrium therewith, and generate an output based on the marker or haplotype information, wherein the output comprises a risk measure of the at least one marker or haplotype as a genetic indicator of prostate cancer for the human individual.

58. The apparatus according to claim 57, wherein the computer readable memory further comprises data indicative of the risk of developing prostate cancer associated with at least one allele of the at least one polymorphic marker or at least one haplotype, and wherein a risk measure for the human individual is based on a comparison of the at least one marker allele and/or haplotype status for the human individual to the risk associated with the at least one allele of the at least one polymorphic marker or the at least one haplotype.

59.-64. (canceled)

65. The method of claim 1, wherein linkage disequilibrium between markers is characterized by values of r² of at least 0.1.

66. (canceled)

The application's sequence listing, which the Patent Office published only in electronic form, follows.

SEQUENCE LISTING (978 sequences)

SEQ ID NO: 1 - DNA, 401 bp, Homo sapiens
tttaatttgcaaaattgaagccagatcgagagcagtaaagccagaggatggtaaatattcatgcctcagtgagcgagggtggctccattaccgttctgagattgagagaattacctgggggattatgtatattcatgggccgatttttatttgcgatataacatgactcacgttggcctgtgtgttacaggttctaccctmaacagactttgcacaaagcgtatgcccttaagcttctgaaagtcatctcaagtggattgcccatcgccttctgcctcctaggagacaggtcagaataataagcacaccagtgaccaaccaggggtttccatgcactcctctctctgccttacaagctgtgggcactattcttacgtccaggtcacagaggaggagacgat

SEQ ID NO: 2 - DNA, 401 bp, Homo sapiens
aaactcactttaggggccacagcctatgacaaatacactcatgcaaattctgtgcttgcttccatgctccatttctttgccaactatgtagctaagcaaaatggaacaagaaatagtgtcttgggagaaataaaattgctggattagatacaggccacctttatataagaaaaaacgttaaattatgctactggtgaaatragtccatttgggttattgtggaattttatgtgagactgagatagctgattaagatggtgatgcttgagtattatcattttagtaataaatatttccagaatcaaagtgaataatatgtagggaagagggaggcaaactgcggccatgggccagcagcctggttttttgttttgttttgttttatggctcttgagctaaga

SEQ ID NO: 3 - DNA, 401 bp, Homo sapiens
ccatataaatttgttcagacaaattatgctaaatccactactcaaaatatgatgtttcttctttttagaaggttctaccctgctttctatgctggtaaaatatttttgttttgagaactaatgcaagtgtcatctcccctataaaatctaagtgttttttacccaagcagtgatccgtttatcccctttatttgttagcayagattacctttattttagcacttacttgctattcaaaaattatctgttgctgtatttgttcctcccagcagactatgagctgcctgaaggcaagatctggggggtcttacgtggccagaagcgtttattaaattaaattccttgaatgatagaaagaaagctcaatggaaaccttccatttagtgtctgtgactccatca

SEQ ID NO: 4 - DNA, 401 bp, Homo sapiens
ctccagcttgggcaacagagtgagactccgtctccaaaaaaattaaaatcaatcaatcgatcgatcggtcaagtgacaggatagtgactgagggtgctccttagattaggtgctgcagaacacctctctgagatgacatctacatgatggtgaggatgagagaaacacggggagaactgcaggcagaggcaatgtggccaygggtcatggaggggccggtaggtgggtctgaggacgggagagaagctggtgtgggtgagggtcagacagcagagggctgaaggcaggaaggtgacagggcgcagtgtggccaggaggactaccaaggaaaggctgtgaaaagtggtgactgtgaaaagtggtgacatgaaatgtcttcaggatgggttttaattttttat

SEQ ID NO: 5 - DNA, 401 bp, Homo sapiens
aaatctctctgccttcctcttctgcttgtaaaggcgcatgtgatttcactggacccactttcaaaacccaggataacttccctattttaaagtccatttaccttaattaatctgcacagccactttgccatgtaaagtaacatattcgtgggcatgaaaccagggggtgaaggtcatgtggctttgagagcagcactctckgtgacacatactcaattctgctcctccagtgcaaaagcagccactgacaatatgcaaaggaatacatgcagccacaacatggaagaaatacgtgcatcaacaacacatagcagcgtgtgtatgtatgtgcgtaaaggccttggaacacagctgaagaatacttttcaaatccttcactgttatttcctctagggaagaga

SEQ ID NO: 6 - DNA, 401 bp, Homo sapiens
ctcctggtatttctcctctgcaattactgtgattttctgaaatcttttctctatcagcattttccccagccatgtatgtttgatttcttgctcttcctacgttatttattaatctctgtgtttgaagtttctttattgttccttttctctgctgctttctttctcatctctgcttgttctagcattaagctagtttattcmgttcatatacttctttttagttctttcatatcatgaaacacacttggaagtttacttctgttttttagattatattttcatccagattgggttctttgttatttctatgcaatactgtatgcatttttgttgttatgggctttcatatttgcatgccatttctttttatcttacacatgcttctgatggttcccatctgc

SEQ ID NO: 7 - DNA, 401 bp, Homo sapiens
gatctcctttttgctctgctcttgcatggagaagtatctccttgatattttgtccacttgatctgacactcatttgtcttccccctgagccccaatatgtagagtaagagttgccttttactaaatttcatgtgacttgagggcatgggggtaggggtgggggcagtgttgagccagctgggggctggaccctgctgtctsttctgagcactcatcactgtcacgtctggaacacccaccctcacagggtgtgcttcactcctatgggctgtgagtcattcgctccacatagcaaagaatcctagaaagtccttctggcctcttctacgacctggtggtgatacatgagattttccattcgcaaagctttccttctttctccccagagctgcattattcac

SEQ ID NO: 8 - DNA, 401 bp, Homo sapiens
gtgaagaaaaatgatattagacacaaagtttagtcggaatgcagtcttacatcctatccagtcttaaatccaaagacttgttccagggctccccacctgcactactccaacgtctttcttctttgtccatcaaggctgtcctgttgcttccaactgactgccactgcctgggctcaggtgccccttggcttgttcctgaaycactgaaacaatgtcctaactgacctctgtgcctcagtctgtcagctgccaatttatcgcacatgcttgacttcaaagttactttttaaacctgcaaatttaatatatgtttgtttgttatttctgttaaataaaaatggttcagatatcccttctttgggttattacttgtttttgtttaatgtggcatggcaaatata

SEQ ID NO: 9 - DNA, 401 bp, Homo sapiens
catgcctcaaaaagtagcatgtcagtatgaaaacccgacaggatgcagatgtctcacatcgtgtatactggatgccttgctggaggctttcagcttcattacgtggattttcgactgccatggtctcggccgccccctattaacctgagcattcacaagtttcctttcctcttccgatccatgggatactgaagagcagaygcagaggttcgcaggtcacccgtggctgaaggcctcaggtgccatgtcgggaatccggctgtgctgaggcggccatgctggagaggccacgcatggagatgcaggagagagacacagagagatgcctggggagtcccagctgttccatctccccagtcagggtgccagatgtgactaaagaacctttcaagttaacccca

SEQ ID NO: 10 - DNA, 401 bp, Homo sapiens
tgtgtggatgctgtgggtgcatgtgggtaggtattgtttgttacctgtttgagttgtatcctgtagaccaggtcttacttgaaggataacacaatttattgagtcagttacagaagttctgcctgtcacccatggactgagaaaagtctgtcaattcagaaagaagaccaagtagaaaggtcttagagaggcagataaatwagaatcactgtcttggccaggctcaacatgggagtctcattttgtttaacctgggaaacctgagaaacatagtgagaccccatttctaccaaaaaaaaaaaaaagccaggtatctcacacctgtagtcccagctactcaggaggctgaagcaggaggatcacctgagcccaggagttcaaggctgtagtgggctacagtt

SEQ ID NO: 11 - DNA, 401 bp, Homo sapiens
ccaaagtgctgggattacaggcatgagccaccacacctggccacattttatatatatattcaccctaagtatactcagacttagtggttttggatactgtgattcaaataaatttgcagaagttagtgcaaacataagttaggaactttgtattatagtttttaccaaataaactccagctgtggtattatcacaggcatrgaactggcatgttaagctgcatgctgctggcctagatgagctgtcactatttgtttctgaccctccattcattcatttgtcaagcaaatattggatgagcacctattatgagcaaggcactgttctaggctttgaggatataagactgaatggcatgaacacaaatccctgccctcacaagataatccacttcttattga

SEQ ID NO: 12 - DNA, 401 bp, Homo sapiens
caaggcatcttcatctgcagaggaagccaggaaatacatgtctctgttggtttggtttggtttctatttttttttaattttagtacattgttgcccagaataaaattaagatcatattagtgagggacaagtggataacaaatactgggtgggcgaaagcaggatgaaccccagatgacctagagcactttatgaacttakaacaattccaggtagacatctccctgcatggcacagcctggcgagtgatgattcctctgtgtgaagctctcaaagcacccatttcctccaggtgcagggcctggagagggagcccaggcccctgctgccctctgccaggccccctgtgtattatggatgagtcggcttgggctgctgtaacagacagggagtcttaacca

SEQ ID NO: 13 - DNA, 401 bp, Homo sapiens
tgtctcatgatgctggaggccacaagtcccagatcaagatgtcacagggttggttccttctggggactgtgagggagaacccatcccaggcttttctccttggcttgcagatggccatcttctccctgtgtcttcacaatcatctttctttttggggtgcctgtctctgggtcaaaatttcctctttgcaaagaacatgartcattggattagagcccatcctgagaacctcatgtcagctcatctctgtacagaccttatctccaagtaaagttactttctgaagtcctgaggtggggactccaacaattcagctcctgtgtggtgcatgacctttacaacggtaagaagcaagctgctccagtactgcctatccacagtgtgaccccatggaaacccag

SEQ ID NO: 14 - DNA, 401 bp, Homo sapiens
cctgtgcttcagcctccccagacacagtggccctgactgagtctgcactttgcatccctctgcctggaataccctctccccagagagccacatgcctccctccctcctatctattttgtggcaggcaagctggggagctgattcaggattattgggtgggcccgatgtaaccatgaatccttgaagacagaaaaagcagaraatcttcctggctaagtcagaaagtagacactaattggagagagactgagtcaaagcatgagagggactccatccgccattgtcaactttgcagagggaagaaatgagccataagccagggaacctggcagcccctagaatctgggaatggccttcagctgacagccagtaaggaaatggggcttgagtcctaaaatgca

SEQ ID NO: 15 - DNA, 401 bp, Homo sapiens
tagatttaatttctttagcaaatatgactactcagatttttttttacttctgtcagatttatgcagttgtgtttttcaaaggattttctccatttccaatacattcatgatattcccttgttatccttttaatatctttaagatctgcagtgatgccccccttttcattggagatgttggtaattgataatttgatttgtwtgtttctcccttaatctctctctctctctatcatgttatgagggaatttatcaattatattagtcatttcaaagaacttttgtttctgttgattttctctattgtttgtctttttttcatttcattgacttctgccctcatcttccctttcttttcttttctttttttttttttttttttttttttttgagacagagtct

SEQ ID NO: 16 - DNA, 401 bp, Homo sapiens
cacacctggctaatttttgtatttttagtagaggtggggtttcaccatgttgacctggctggtctcaaactcctgacctcaaatgatccacccacgtcagccttccaaaatgctgagatttcaggcgtgagccactgtgcccagccactttaaaatatttttgactacctgtatataacccaagtctttaagagttcatcwtaacagacttccatttgtagaacatgcttagattctaccctgagtccctttattgattcgaggtcttatcaagtcacaatgtttactagttttgaaaatgtgtttaacatggaaaacactgctgcgtctcgccacagcattttatcttcacatctggcttggggaccatcagcttaccaagtccactcacgcccgctaat

SEQ ID NO: 17 - DNA, 401 bp, Homo sapiens
aatgacttccataggccaagaggtcttagggagcagagccgggccaggaccccagggatctcatccccaggtccaccttcctttttgcttacctgcttttcctctcaataacctcaaatcagtccctgatcttctgttctcttaagggcctgagctaggcaggtgagtggaccataaaggtgaacaggacagagttcttcrtctgcaggagctcttggggttggctagggaaacaggacaggtacgtccacatggccactgtatgaagctctgtagggtgagcatcatgtaatgggccctggcaacaatgctccgagctccaagcccttcagaccaggacagttaggaaggacaaaaaatgaaggagctgtgactgctggaagccccaccctcccacaggt

SEQ ID NO: 18 - DNA, 401 bp, Homo sapiens
ccctctttttctgcaactcctgaagggaaacactgtcttgaaattggggtttataattacccttcatgtctttatattccactacagttgtacagatccttaaagaatttacaattccaagcttacagaaaagttccaagaatggtacaaaaaactcctatatgccctatgccagattcaccaaatgctcatacttacttygttgaaatcgatcatcagtatttactctattagaacatataatattgctttgcatattagaaatatatcagtggtatgtggcatgtatattctacagtctttttcacacattattatgtttgtgagatacagccatgttgacgcatgtagatctagttcattctttttttttttttttgctgtactatattctctagtga

SEQ ID NO: 19 - DNA, 401 bp, Homo sapiens
gtcacagctgaatgtagaaatttatcacgccttatgatggctgtcttctatgtaattctaggcagagaaccaaagtctctagaatcacaggcaatatttttgtcactatttttaattgtatgaattttagaaaagaaaggaggaataggtatctgtaatatatgtgggggctaccaaagtaaagccaactgaattaatatrtaaatgaactttaaaaaatgggtttgggttttctgagacatagttaaagaaaataggctaggaatgaagtacatcccataaaggttagaaagtagatgtttgctgggtgacttcctaatctgatttttgttttcacatttagaactgaaacagggagagaaaatacccagataaaactctaaaacttagtattaagtgga

SEQ ID NO: 20 - DNA, 401 bp, Homo sapiens
gtaatttgtttttggttaaaatagtaggttgaacacctctattttatcttcaagccccactaaaatgacagtaagtcgaataaacacagacaaagagaagagacaggaaaatagcaacaacaatttggaagctaaaaagcagatgtatgagaaagtgtaatcctaactggcaacagaaaaaacaaaaaacaaacaaaaacyctgatttgtaacctggaaccccagataatctcaggagttggcaacaaaaggtaactgtggacattgaaatgaaaatgatactgaaaacatgaagattagctgaaagacaggaagacccctaatttcctgccctactcttgatagtgagacaaagacctttcaccctgacaaaggctgaggttgaggacaggagttaaggt

SEQ ID NO: 21 - DNA, 401 bp, Homo sapiens
ggttctggaagattcttttctccgtggaggagctggaggaagcacgcaggcctggggctggcggcagccctcttccagccgcaggtgaagctcacaccgtggaaggaaaacagcaaagcaagaactcaggccactgaccacatcactgtgcccctgaatgaagccaggcccgaagcctgctgtacctctggcactcccagrtttcaagccaacacatcacattcccttgtgggtaggttttttgtttcttacatcccaagatatcttgaggatggtgcaaaacgtaggatgttataggcaggatgtgaggagcagggtggaggatgcccaaggccacgctccaggctgagaagctggcgttcaggctctgcaactgtgctgtcgtgggctgagctgtgtca

SEQ ID NO: 22 - DNA, 401 bp, Homo sapiens
cctgtggccctccaatatggcagatacacaggtccaagagtaagtgttccagcaagaaaggcagaagcacatggccttgcatgacccaccctcagaagtctcttaaagtacttccactgtactttattagttgaagcagtcacaagtttcagactcaagaggaaggacatagactcacctctcaatgacagaagaggcaayaaatgtgcagccatgtttcaaaactgccacatctaccatccatgcattcttaagaggctccttgaggatgtgctcaagcagaataaggtagtaaaccaaggaaaaggaagacatggaccaggaaacagtggatcctactaggacagtcttgggaagtcccaggctgaccaactcactgtggggcagagagcacccactcc

SEQ ID NO: 23 - DNA, 401 bp, Homo sapiens
gttcctagccatgtggggccatctgaacaaacaacaggggttgatcaggacacacactgctgggctcagcgggcgtcagcattgcagggatgggctccttgttagctccagtggtctcacgccaaagtccctgtccagtcccccaatgctggtgaggctgatgacctcccaggagagcatctttaaggtcctgtctggccyagagtatctattatgctaaggaaccaatgagaccttttagacacccctttattttaacacattttaaatgtcaaacacttagcattttacaaactagtacatgcatggaaaaattccaaaaagctgataattacacaagtagcccctgcccctgcctctgtccaggccccttcctcagaggcagccaagtgacattttta

SEQ ID NO: 24 - DNA, 401 bp, Homo sapiens
agttcactgtcacttttggtcaaggagtgggtatgagttacccccatctgtcctggggccccagggttggctgttcccagaaagcctgatttactctgctgagatgtgaagcctccattcccttgtatttaaagcctacaactgacctggccctcagaagccattttcctccatagcttcaaacatcactgccagttcatytgacaatatttgttgcttctcagcacggggctggcacagggatcccaggggggctcaggattgcccccaagctggggaagcgggcatggccttgatcatttaggccctgctatctgccccaagatagaggggctgaaagggcaggggctgaaatggcagaggctgggctgggggtgggagacaggccttctcagatgcca

SEQ ID NO: 25 - DNA, 401 bp, Homo sapiens
aacccccaaccccatgtgaatgcagggctgatctgtcaggagtcgaggctgtccccaaatggaagccttctagggcaggaactggcagaacattctaggaccccggattcctaaggttggctgtggaagctgtcctaggggcccaggagggagagtgcagctctaaaggcgggctgcccatggcacctgtctctgtgtccyggccacctcctcattgcaggcccttcctgggccactttcttgtctctaaatgaagaaaaacaacatcccatctcatccttaaaatggctccactttaaggattatggtgttgataaaaaaacagcaatgtaggctgggcatgggggttcatgcctataatcccagcattttgggaggccaagagaggcagttcacctgag

SEQ ID NO: 26 - DNA, 401 bp, Homo sapiens
cggctttttcttgcagatgctgtttcattgtctccttgtctgcagagtttttgaggacgtggccattcttgcttctgtttccctttacctcgcattctcagccatttcattaggatgtgcctttgctagttgtctcaggctggcttccctggaagcagatgaaggagtggagtctggggcaccaggtgtttcacacttgtracaggaggaggcagaagcaggcttggcagtggagttcaacctcggtcaggcctgcccacctctgcccacctgttggggactccagagcaaggccttccatcagcatgttctgtgctgagctgaaatggccagatcttcacattccctgcctgctcagtcacctgggctgtctgggaaggtgtggcctttagccagtggct

SEQ ID NO: 27 - DNA, 401 bp, Homo sapiens
ggtgaaacaggactggccaaggatgatgactttaggggccagatgctgggtacacgcattatacagtccctctacttctatgtacatttgaaattttcagtagaataaaaggagcataaaatataacctccacatcacattgggcaccttctcctcctcataagcactctctgcagctgcgtagactgcctcgtggattcrtgtgggttcttggaatccggccacattcagagacgtgtgaggcagggtggttggggattgaggttctcagtcaggcaactcaccctctctgtgcctcaacttcctcatctgtgacatagagctgccttctagtgttgttgtgaggactcaaagggtcctacaccagagcacatgggctggctcctggagaggggagctga

SEQ ID NO: 28 - DNA, 401 bp, Homo sapiens
aaacattccaatttttaagtgttgacaatgaattcttacaaatttaatactacacagccctcttgccacatttggcctacggggtatcagtttgcagccctgggaaggatgaagcgagggagaggaaggtagtgcaggctccttcccagggagtggggacacagaaaaaggggcaagcagccccatttgtttgcgtttccrtacagtaagcaaacctacaaaggaatgggccatcccctgttgctgggtcaggaagcagggatcacaaatgccggaaaaaagaaaaaagaaaaaaaaaacacctaggcacaacctgggctttctgccctctggcagtagggatggggttgagaggcagaggaccaacgctgtcactgtgattcccaggcgcactgagggga

SEQ ID NO: 29 - DNA, 401 bp, Homo sapiens
taagcatataataactatataaaatatacaaatatgatgggatatcgtgcattctttttttcatactaggtccccgaaatccagtgtgtattttacactcacagcacgtctcacttcagatgaaccacatctcaagagctcagtcccctatggaccaacactcacattgtccccagttcccctctaaacaatgcagcaatracatgctcacacatgcctcctggaaggctagggtgtgaattcgtttctctcctgggtacgtccccagggcagtggtggctggctcagacttaattggccatggtttgccagctccctctgtaggatggctgcgctggccacacttgccctcaagacacaagggtccactggctccacacctttccactttctgcattacc

SEQ ID NO: 30 - DNA, 401 bp, Homo sapiens
tgattctcctgcctcagcctcctgaatagctgggattacaggcactcaccaacatgtctggctaatttttgcatttttagtagagatggggttttgccatgttggccaggctggtcttgaactcctgaccttaggtgatccacccgccttggcctcccaaagtgctgggattacaggcatgagccaccatgcccagccggrattcttaatttctgaaaaactgagttccttccagtttatatattaggcacaggaatcctgatccaaaggaaatacactgcagcaccaattggctgactttggataagtaatggggtacattttacttgagtaaaggatgggattgagttagagggcctcccctcagtaaagtccctcttggttaaaaatagattaaagat

SEQ ID NO: 31 - DNA, 401 bp, Homo sapiens
aacttagtgactggtacttacaaagccaaacaaattaaaaagtgagttattaactataggagaaaaaaagtttaaagaaggaaatgtcagtataatatgctattttgcttcactatgggtaatctgtacataatcatagtaacgtaagcactaaacactgaatcagctgagatttgtgagatatctctattgggatcatgrtagggttggggggactgtgggaaggtgttagaaaaccaagctactcttcaatggtaggaaatcagtagataatgtctaaagttagaaatcaatcagtagtagtatatgcagtggttacttggaggtaaataccagaagaaaaaatataagtgagttgataatgactgcatatgagcattgaaggtgtgaagtaaaaagtt

SEQ ID NO: 32 - DNA, 401 bp, Homo sapiens
agtttaaagaaggaaatgtcagtataatatgctattttgcttcactatgggtaatctgtacataatcatagtaacgtaagcactaaacactgaatcagctgagatttgtgagatatctctattgggatcatggtagggttggggggactgtgggaaggtgttagaaaaccaagctactcttcaatggtaggaaatcagtasataatgtctaaagttagaaatcaatcagtagtagtatatgcagtggttacttggaggtaaataccagaagaaaaaatataagtgagttgataatgactgcatatgagcattgaaggtgtgaagtaaaaagttagagcacaggattgctgcttttcattttaggacacattgatttttcaagccttgtaaatgtatgaatt

SEQ ID NO: 33 - DNA, 401 bp, Homo sapiens
aatgccaggaattcagagtagggaaagcgatcccagtggtcagggatcaggaagggctccatggaggaggtggcttgtgagctaagaattgaaggatttccatgtgtggaaacaagaaattatcccagacaaaaggagcaccagaagcaaaggatcagaggtctattcagggattgtggggcaaccacagaaccatacacrctgcaatcttctggacctcctctcttagactgcatggctctctacgctcaactagcaatcatcctgcaaaatccagctcacccttccctcttctccaaggtcttcctaatcctcctctccaccctctccacagttcccctccccgctttcccaaagcactttgttcccatgactgttatagcttaccagagactgctggt

SEQ ID NO: 34 - DNA, 401 bp, Homo sapiens
tccaaaatacaatcacattctgaggtactaagggttaagacttcagcatatgaatattatggggacaaaattcagcccataataccactatataaaacttattcatattgacgtccatgagacctaaaaaggggaggaaagttttcagtttggtgtagcagtccttgaagggaattgtaaggtgtattttatatgtattcygttctcattatagaaaagtatataatgatcatgggatggacttgggcttctagaacagctagttgcaatagttttttcctgcagggatgtctgttatgggtgacagttatatgtgcaaacagtcccttgggcctctgtaccaccttcattcccctttcaggaaaccactttaaaaggccaaatgatggctcaatctgatt

SEQ ID NO: 35 - DNA, 401 bp, Homo sapiens
taatagcctcatgttaacttagtcactcctttaaaccctatctccaaaatacaatcacattctgaggtactaagggttaagacttcagcatatgaatattatggggacaaaattcagcccataataccactatataaaacttattcatattgacgtccatgagacctaaaaaggggaggaaagttttcagtttggtgtagyagtccttgaagggaattgtaaggtgtattttatatgtattccgttctcattatagaaaagtatataatgatcatgggatggacttgggcttctagaacagctagttgcaatagttttttcctgcagggatgtctgttatgggtgacagttatatgtgcaaacagtcccttgggcctctgtaccaccttcattcccctttc

SEQ ID NO: 36 - DNA, 401 bp, Homo sapiens
agtcattatccattctttctccttccaccccaagttgctggcaacaactaatctatattctttctatggattttcattttctgaacattccagacaaatgggatcatataatatgtggtcttttttcacttagcataatgttttcaaggttcattcatggtgtagcatatatcagcatttcgttgctttttgtggctgcawaatatgccattgtgtggactgtagaatgggacatggcacttaccgtttcagcagttgcttccactttttaggtattatgaataatgttggtatgaacatgcacacacaggtttttgcatgaatcatttgctttcaattttctgatatatgtaggagtggaattgctcggtcataaggtaaatctatgtttgactttttga

SEQ ID NO: 37 - DNA, 401 bp, Homo sapiens
tgtctcccagagttaatcccttcctgagccactgctataccttgcacgtatttcccttgttccgtctaccacactgagttacaaggccaaggtcacatagctattaaggtgctatgtaaagggtgggacctaggcttgcctgcctccagagccatgccccttcgctacactggaattgagggggtaaagctttacaaattmgtccattaaaagcagcacatgggcatttatatgaaactattttacgtaaaaaaatgaaagtggattccaagcacccaagtgtccatgtgaatgctttaacaacagtttgaaaaataatgtgaggacacaaacattttattccccactctctaacctaggaacctaatgaaactttttttcgttgacagctgtagttacac

SEQ ID NO: 38 - DNA, 401 bp, Homo sapiens
gaagggcaggagagttgcatgtttaacctactagtaacatttgtttaaggattttcacatcttctcaggtacataggttgcataggtgacaagaatcactgtaaagatgactattaagtattaagtatcattagaaaacctcccacccaaaacctctgtcactaaagagtagagtgggaactcttccaggttttctgcctstgaaactgagtgtcttcactaatacctgctgcctacactacattaatggctttagagggcttaacaaacattaattattgtacagacggaagattctgaggttgaaataccttgtgagagactgacagtattaagtgacaaaactgtgttctttaaaaacacttctaggcaggcactgagtcagcattcctggccctctg

SEQ ID NO: 39 - DNA, 401 bp, Homo sapiens
tgtattttctatgaattaagggtaaaacagtgtaataaaccatattggggaagggcaggagagttgcatgtttaacctactagtaacatttgtttaaggattttcacatcttctcaggtacataggttgcataggtgacaagaatcactgtaaagatgactattaagtattaagtatcattagaaaacctcccacccaaarcctctgtcactaaagagtagagtgggaactcttccaggttttctgcctctgaaactgagtgtcttcactaatacctgctgcctacactacattaatggctttagagggcttaacaaacattaattattgtacagacggaagattctgaggttgaaataccttgtgagagactgacagtattaagtgacaaaactgtgttc

SEQ ID NO: 40 - DNA, 401 bp, Homo sapiens
tgccaatgtttgatacacatctaccaggagccaggcatcatgtaatttcatgttgcttctcactgcatcctggtaaccaagattcagtggtgcaggaatctgcccaaagccacgtatgtatgactaacaggaacagccaggatttgaacgcaggtgctaagctccaagttcaggcctttttcagaaagctgccccttgcaygaccaagtgctttggtttaggaatttcatttttagaaacttattcactgagagcagctgccaaaatatacaaagatgaacatatgaggacagtcatggtttcaatgttaacgataaaaaaacctggaaatgacttaacgttgctttatcgttgcaatataagcttatactgtgctaagaaaagtgaggcaggattgtgta

SEQ ID NO: 41 - DNA, 401 bp, Homo sapiens
atatttagtgccaaaaaatgtttatttcctttccctaataagtcacactctctaaggcttcccttgtatgttttgaactttttattaaaaacatgctgttacaagatttccacggcacttggtggatgtagcacagcatgccaatgtttgatacacatctaccaggagccaggcatcatgtaatttcatgttgcttctcaytgcatcctggtaaccaagattcagtggtgcaggaatctgcccaaagccacgtatgtatgactaacaggaacagccaggatttgaacgcaggtgctaagctccaagttcaggcctttttcagaaagctgccccttgcatgaccaagtgctttggtttaggaatttcatttttagaaacttattcactgagagcagctgcca

SEQ ID NO: 42 - DNA, 401 bp, Homo sapiens
taaatacctttcacaaacatcaaactgcctttcatctctgtcccttcttttaaataaacaccaaaatacaaagtggaccatcaaaaaatacaaagatcaatccaattacaggaaaacaatagcagttcaggtctcttactcagaagcaagtttaagagatggaatacttttaaaggtaagacagcttaagaagataggccrtttccgagatgcagaagttacctataaatatcatacaaactttctataagagagcaatgaggtttcagagctagagtactttttgcttctcttgaactaagaacttaaaaatgtatcttacctgtcgataggcccaacccagaagaacatgatttcacttacgttagaactgccttaattttgtttcgttaatggcaggt

SEQ ID NO: 43 - DNA, 401 bp, Homo sapiens
ataggttattttgattctctctctctctctctctaagttttttaaaaataaacttttcagaacagttttagatgtacagagtcattgtgaacatacaatagggagttcccatgtatcttgtacccagtttcccttcttgttaacgtgttacatcagatagcacatttgtcaccgtgaatgaccaatactgatgcattattmtactgcgttcacattttctcagttttacctaatgtcctttttctgtcccaggatcccatccaggataacccattacaactagttgtcatgtctccttagatgcctcttggctgtgacatcttcttagattttccttgttcttgatgaccctgacagttttgaggaggactgatcaggtatctgtagaacatccctcagtt

SEQ ID NO: 44 - DNA, 401 bp, Homo sapiens
gctctgctaggacacaagcactggcctcttccaggtcagggtggctacattctgtaccctgctggagctggcttgctgttggttcaggtggaacagcgagcctggccttgtcctctgagtagaaaaggccacaggcatattctggcctggtcaccaaaaggctatcactaaatcatattttattgcttcctttttatagarctggtagcctccctaatggctatcatcatgttgattttttcactatccttttcctaaagcttatcaaagggggaacagcagaaaagcgaacagccaagacagggagctgagcttctgttgacacttggggcaatgtctagttagaccaatccatctttcagatggggagactgagactctggagtaatgtgacttgctcg

SEQ ID NO: 45 - DNA, 401 bp, Homo sapiens
tgagaccccatctctactttaaaaaagaaaaagaaaaagaaagaaagaaaaaaaaagttgtacacaaatgttcagagcaccattattcataataacccaacaacccaatgtccatcaactaatgaatggttaaataagatacactattaaatattccatataatagaatactattcagctggaaaaagaaataagtactaygcatgctacagcatcatgctaagtgaaagaagccagtcacaaaagaccagattatatggtgctatttatacaaaatttccagaaaaagcaaatctatagagacaaaattgattaatggttgccagtggatgggggtaagggtgcagaaggggacgatgactattgatgggtatagtttctttttggggtgatgaaaatgt

SEQ ID NO: 46 - DNA, 401 bp, Homo sapiens
aggcatgccaggcataccagccataaggcccacatgcatctgtctccagaagctgcccaagtagccatgctggatctggcacacactttctctccaagacttaggaagcacttatgacagtggtcttgtctagagagcatcacggacggggattcagagtagctacaagatgctgccacatggacttgaatcacgcattcrattcctaattgcaagtgaaagaaaccgcctgagggggaagggctgttgctatactgcagtgctcacagcactacagaacccccattgtggggcttacccagagccagcaacaccagagtttgcatgttttgtttttttttaattatttttagagatgaggtctcactgttgtccaggtgggagtgcgatagctattcaca

SEQ ID NO: 47 - DNA, 401 bp, Homo sapiens
cagcacagggctgggggagactatcgccttttctcctccacctgaattcaatccaaacccatgctaggagcctagttttcctactagctatgtgatcccagacagggtgtgtccccactccaggtttcagtgtcgtcatctgaacacagtgataatcacacctaaaaggtcacaaaattggcagcctcccccaaaagatgrgtttggttaaatgtaaaaaggttgcacaggtgttctgcatgggaatcccttcacagcacacgctcactgctgtcacactccctaccatgccttatcacttcccacatacccaatctagctctgtctgatctgggagacattggagtttgggagccctgggtgaaatgagttttcacatgcaaatttacctgttctatact

SEQ ID NO: 48 - DNA, 401 bp, Homo sapiens
gggaagagcagcaggttaaataaaggttcacaggggagcagcagcagtgtcccctgtggagctctgggaagtgcccacaaactgggcagggcagtatgtggagctggtctgtggagctgccctgtgctctactagggagggggctgacagccccaaggctccagagcctgtgctccagcagagctgggcgacacaaatccmtatttctggggcctcataggggccagaaactgtgactgcagtggggcagatagcacacagtgtgctatatggctgcctaaatgccgccagaaacttaggctagagtcaagctctaagctatgaggaagaaagaactgttctgaggcatttcctcagggcgactgtgctcacagagccgcaagagcatctcagaatgtggg

SEQ ID NO: 49 - DNA, 401 bp, Homo sapiens
gctggcccatcatggacaggatatcttgtcccccctgcataagagaagacttagagtcagtgctgctttctaaggtgactacagaagcctcatccccctgcatcccactcatcaactcaacatgggatcctgaggtatggagacccctcctcaaagcctgaggagcttctaaacacagaggaatttttagaggttcccctracctgtaagaatcaaacaaaatcctttcatggcaagtataagctccgtggggcctgcccagcctccttttccagccctatctttttccaaccccttgttccttgattagccacacaagactaccagccctgccctggacacccccaagcttttttatgactcaatgcttttgagtctattccatctgccaggaatgccat

SEQ ID NO: 50 - DNA, 401 bp, Homo sapiens
tgaatgcataagtaccacacaacagactggctgggggactaagcacaccagggagaaaataggggggccagcatacctgcatccctatgtaacgagcatgagagggacacaggggacacgtactctcctctttcccttgattccaaaggctgtaaactggcagcagcgcttttataaggatggtcctggctgccgtgagaygggtgggcccagcccccactgtccacaggaccacaggccctatcacccctcttgaaatcatcatccctacttcactccttcatttgcctcacctcaggtggggtggaactttccacaactgaagtacctgccagcacctgcttaccaatctcaaagctggcatcttgcagggcctttgattttggataaggttctcagtt

SEQ ID NO: 51 - DNA, 401 bp, Homo sapiens
ttatatcggttaatttcccaaatgaattgactgaagatgtaattactggaaaggtggcagatgctactgagaaatctaattaattcagaatggaagtgacgaggggtaggtataaaagagatatttgcagaggcaagttcctgagatggaaaccctgttaggaaaaagaaaaatggccctttgaagaagtgacatttttaygatctccataaagcagtgaccaagaaacaacctcagagaatcaaagaaccataaaatcgtagaacagaataaaaatggagaaattatatggtcaatctcctgcagtttatagatgagaaaactgagtcccagagagctcaactgacttccaaaggtcacacagcaagctggtgggcagacagtacaacggttaggactca

SEQ ID NO: 52 - DNA, 401 bp, Homo sapiens
cagtcaggacaaagactctcagatattaaagttaaggaaaagttttactctaccttcattctatctgatagcctataaatggaagttttggaatagccccaaaagagaggacccatttcatttgtgctttaccaaattcttagttcctgaacattaatcttagacaaaaattctccaaacaacacgaatatatcagaacaytgtggtaaactgggaaaatcctgtacttttaaagtgaactttgattttttaaaatcaaaccttttatatcccacagcgataaattccttcaaatggaatgcttacttatatttactgctagatgaatgtggcatgaaattcctcaaggaggggaagaaagacattcccgtctctcactagcccccacatttgtttagaag

SEQ ID NO: 53 - DNA, 401 bp, Homo sapiens
acagaagagatgaacatacttccattaaaatatgataaatacttggttaaaaaaaaaaagcttcatgtgtgtctcgtttcctccatttaaagacttccagagggaaagtatatgatatggctactattcctacacctactacagagtgctgcatagacctcatcgaatctccccaactagcctatgaccttgatcatctartttgtattttatagattaagaaacaaactcaaaagttaccaacacacccaaggtaaaaccgcaagcagcagcaccaggatgcaaaccccaatctccaaagccatttttttttgtactcaccccatgtgagtgacaagtggcacaaaaaagaggttgttgccaaaagaaggttgaagaaatctctatttttcaatctcatc

SEQ ID NO: 54 - DNA, 401 bp, Homo sapiens
gattgcattttgatattctggtgttttttaaaaagccaaaaactgaaacaacttggaaagatgttttctgatttctatcacctatattttcttttcattaaaacaatttaacttcgttgtctttgaaagcacatttgttaactgctcatggaatcatatgatgagctgccaggctccctcatctttgtgatttctctaccrcagtggatatggttacctactcctttctttaaaggttctcctttcttggttcctgagacaccattctctccctggctctgctgctcattttttaaaaattaattaatttaatttttaattgacaaaaattgggggaatataatagcattagcaaggtgggtctgatgatggcaccgtggtcatgtaggaagacatcctta

SEQ ID NO: 55 - DNA, 401 bp, Homo sapiens
tccctcatctttgtgatttctctaccacagtggatatggttacctactcctttctttaaaggttctcctttcttggttcctgagacaccattctctccctggctctgctgctcattttttaaaaattaattaatttaatttttaattgacaaaaattgggggaatataatagcattagcaaggtgggtctgatgatggcaycgtggtcatgtaggaagacatccttacaacttactgtcaagtggttcagaaataaactagagaaaaagcaaatgtcacaaaatatttataactggctatctaggtatagggtatagaggggctcatcacactattctttcaagttttttgtaggttccaaacttttcaaaatgaaaaggaaaaaaatattcaatagattg

SEQ ID NO: 56 - DNA, 401 bp, Homo sapiens
gtcaaaaagataacaaatatgagaggctaaaagacaaagaggacaaaacgagaagctctagcccagggtttctcagcttgactccatgacgtttgtggccagataattccttattatggaaactgctctgtgcactacaggatgtttagtagcatccctggcctccacccactagatgccagtagcacccccaaccaagtygtgagaaccaaaaatgtctccagacgttgtcaaagtcccctgcaagggcaaaactgccccaggttgaaaaccactgcaatcttaacctcatctcagtggagttccagaaggaaagaacaaagagaatggggaaaggcaatagctgaagagattaacgctgacagtttttttgttttttttttttttgagacgtagtcttg

SEQ ID NO: 57 - DNA, 401 bp, Homo sapiens
gacaaagaggacaaaacgagaagctctagcccagggtttctcagcttgactccatgacgtttgtggccagataattccttattatggaaactgctctgtgcactacaggatgtttagtagcatccctggcctccacccactagatgccagtagcacccccaaccaagtcgtgagaaccaaaaatgtctccagacgttgtcraagtcccctgcaagggcaaaactgccccaggttgaaaaccactgcaatcttaacctcatctcagtggagttccagaaggaaagaacaaagagaatggggaaaggcaatagctgaagagattaacgctgacagtttttttgttttttttttttttgagacgtagtcttgctctgtcacccaggctagagtgcaatggcatg

SEQ ID NO: 58 - DNA, 401 bp, Homo sapiens
cttgtacttgtggagctcatgttttagggagggatacaaacatacaaacattgcacacataatcttcatcactactatgaagaaaaagggatgatgagagagaacgagtggctagaaagtgatcctggagtgtctttctgatgacatttaatttgatatgtgaacctctgggaggagcaggagtcagcgttccaggcaaasaaaacagcgaattcagaaaatccaaagcagaaacaagcttggcatatccaagggacagaaaggttgcagtgaccaaagtatagcgaaaaagaccaggaagatgaggttgaagaggtagacagcggccagaacgcagaacaggaacttacagtgtgtggtaaagtttggattttattctacataaataatacaaagccact

SEQ ID NO: 59 - DNA, 401 bp, Homo sapiens
attttattctacataaataatacaaagccactgaaaaggtcttgaagactatgtgtcatgctatgatttgtttttaaaagatggtgctagctactactgtgtgaagaatgcacagtatgagtacaagtgggaacactgatttttggcccagggtacagggatagacgccaggggcccaaatacctcttgaagttgggaacraaactgtgtttatgttcatatatacattttttccagagaaaggatccatagctttcatcaaattcccagagtaacctattaaggggtaagaatcaatgacatagagtactagctggccatcagtgaacactgtaaatactgaatgtgaagttaaacctatggcactattagatccattgaatatgttttgaatcctcaag

SEQ ID NO: 60 - DNA, 401 bp, Homo sapiens
cagttgactgtaaataacattttgcagttttcaaaattccacagccctgtaaggtagtgtaattacgcatgcagctacaaacaagcggaaagaggcccatccgcccaagaaagcatcacaaataatcagaactagaaatcttcaggcttcaaaacctatataataatgctcatcacgtcccatgactccagctgagacaaycagccagcaaattgtcccttcaggtttcataatgatattagcacaacctgcaccacaattgtacttgccatccatccatccatccgttcaacaaacacgagccagacaccacaatgcactggggatacagggataaaagtcttgatgcgtttacttcttgcttagaaaacttgcaacgtgagatgtgctgagacaggtac

SEQ ID NO: 61 - DNA, 401 bp, Homo sapiens
ctgacacagatccagtgtgtaaagatgctggacctggctgcaaagtcagacaatttctttcatttcaacagaaaacaatgtggcaggccagtatccaagctacacaagtccaataaacagcaagtgaggcctgctgcagtggacagggttattcctgaccagcgtccatcccacttctgcgcaccaccactctcgttttcyttcaggaaatgaccgttctcccactttgagtctgcgtagtttgggcgaactgaccccacaccccatgtttgtttcagtggtaaacacgtggccctggcctgacctatcagtatcccatcctctcagacactgtaattggctcagaaatgtgagcagctagttcaatgacagtcagtcctggcaatttactggacatatca

SEQ ID NO: 62 - DNA, 401 bp, Homo sapiens
atgtagcttttactcttgctgctcccatgaatctgctatctcaaaagtccagggtgccacaaaatgagtcttaataaatgttaaaaattgaaataatacataatacttttccaatcacaatggaataaaacttgaaatcaataacagaaggaaaaatcacaaatatgtggaaattaaaccatacattcttaaacaattaayaggtcaagaagaaatcataagggaaatcagaaaatactttgaaatgaatgacaacaaaagaacaacgtaccgaaacttatgggatgcagcaaaagcagtgttaagagagaagtttatagctatgaacagctataataaaaaagaagaaagatctcaaattcataacctaactgtacacctacagggaccaggaaaaacaa

SEQ ID NO: 63 - DNA, 401 bp, Homo sapiens
atcttttaccaaaaatttttaaaaagattaaaatggagacaaaatagagaaacagaaaaacagagaaaataaaaaaactaaaagttggttctttgaaaagaataacaaaattgacaaatctttagctagattgactaagaaaacaagagagaagactaatgataaaatcagaaattacagcaggaacattactatttactmtacagaaataaaaggaatataagcgaatactgtaaataattataaacaaattggataatctggatgaaatagacaaatttgtggaaaaaaactgtgaacagactaccaaaactgactcaagaaaaagtagaaaatcttaactgtaatcaagtaaggagactgagtcagtaaccaaaagtctccctataaagaaaagccta

SEQ ID NO: 64 - DNA, 401 bp, Homo sapiens
agatcaaagctgtaataaaaagtctcccagcaaagaaagacctgagacccaatggctttagtgctgaattttaccaaacatttaaagaagaactaatatcaatcctcctcaaactatcccaaaaaatagaggagggaatacttccaaacttattttatgaggtcagtgttaccctgatacccaaatcaggcaaagacgtawcaaaagaagaaaagacaactacaggccaatatccctgatgaacattaacgcaaaagtcctcaacaaaatattagcaatgtgaattcaacaacacattaaaaagatcattcatcataaccaagtgggatttaccatagggatgcaaggatgtttcaacatatgcaaatcaaccagtgtggtacatcatatcaataaaatga

SEQ ID NO: 65 - DNA, 401 bp, Homo sapiens
tgtgtgtatggccccatttgcctgccgctgtgagcacgtgtgtgtgcgtgcatctgtgtgtgtgtgtctctgtgcgtgtgcacgggcatgtgcatgtgcgtctgtgtatctctatgtgtgtgtatggccccatttgcctgccgctgtgtgcacgtctgtgtgtgcgtgcatgtatgcgtgtgtgtctcatgcgtgtgcacrtgtttgcgtgtgcatctgtgtgcatgcacatgtgtctctgtgcgtgtgcatggccccatctgcctgccgctgtgtgcacgtgtgtgtacgtacatctgtgtgtctctgtgcgtgtgcacgtgtgtccatgtgtctgtgtgtgtgtgcatgcatctgtgtgtgtgcgcacttgtgtgcgtttgtgtctctgtgagtgtgca

SEQ ID NO: 66 - DNA, 401 bp, Homo sapiens
acagagcgctgattggtgcattttacaatcctcttgatagctatagaaaagttctccaagtctccactcacccagaaagtccaaatggcttcacttctcagaaggatccctccatctcgggctcctagaggcttcaggcaggaggagccacgtgagagagaaaccctgcctacggtgacctccagttcctagaccacccastcggagcacggcgctcggctgtgcccgtgagcctcaggagggcggaagcttccgggccggaacgggtgtgcacagcgcgccggttacgggggggcaacttaacgggccggaccgcggcgactaccgagggaggtgaggggcgggccgggcgggtgtccgaggcggcggcggcggcatggcagggcggcgggtgaacgtga

SEQ ID NO: 67 - DNA, 401 bp, Homo sapiens
cagggtcacactatctaaagtcttctcctcaatccatgtttcagtcaggtgaatttcaaggggcacacaattctctacccattcctccctgcccccttataactgaattctgtttggtcacatcaaagtacattttagaacatggactctgagccagtccagactggaggtggaaggcagaggttaaaaaatgagatggcragtttttagtgttgtctagtaaatagggtagatgagtggtgaaggacatacttttggagtcagacaaaactgggcttgaagcctagcttgctttcttccttagctgtatgacgtttgaacctaattctggaccttgctccaactggaagatagtggtaaccacacaactatttattggcttgacttttcttgtgtatttg

SEQ ID NO: 68 - DNA, 401 bp, Homo sapiens
gggacttagggaggcaggtagttagtgaaacagtccaggtctgcctgactccaaagctggagtcctttgcatgcttccccaggttaccctatagttccctcatccgcttccaacatacgtgcatacctcatgttattgtgcttcacttgattgtactttgcagatagtggtttttacaaatcgaaggttcaaggcaacccrtccaacagcattgcttactttgtgtctctatgccacatttgggttattcttaacaatatttcaaacttttcatcaaatattaagcatcaaacatttcacttcatttcaaacacatgtcatctgttaatggtgatctgggatcagtgatctttgatgttactattgtaattttgaaatgtcacaaacaatgcttatgtaag

SEQ ID NO: 69 - DNA, 401 bp, Homo sapiens
accctcaccccctcatactttctcatgtccctgtttcattgccccagcagcccttttcactacctgacgttcttcatgtgtttacttgttgagtatctgtcctctgctagaatgtgagctccatgagaccagagcaggaaccttgtttgtctcattcaccagtgttctcagcacttgggccagagcctggcataggatagrtatttagtaagttctggatgaatgaagcctgtgtaccagctcctgggctagccagttttagtgagcagagaaccttctttgtgggttagtggacagaaggcaactagcttagggcctggcctgtagtgaattatgcaggttggttctttgtcctcccctttaggagcttacatcagaacccggaagacactgctgtgtac

SEQ ID NO: 70 - DNA, 401 bp, Homo sapiens
tttcactgagtgtacactaagtgaacactcagtggttttcactgtactcatacagttgtgtagctgtcatcacacaatctcagtttagaccattttcgtcaccccataaagaaaccacatccctaccaggagtcattccccattcgcccctctcccaggcctaggcaaccacgaatctacttaatgtctctggattgaccrgtcctggacatttcatataagtagatcacacaatatgtggcctttttgtctggcgacttttgcttggcctcctatgttgcccaggctggtcttgaactcctgaagttaagcagtcctcttgcctcagcctcccaaagcgagcatatgctttgggaaccagtattgcatttttttgtgaaaaaaaaaaaaaacaaaactat

SEQ ID NO: 71 - DNA, 401 bp, Homo sapiens
gttgtgtagctgtcatcacacaatctcagtttagaccattttcgtcaccccataaagaaaccacatccctaccaggagtcattccccattcgcccctctcccaggcctaggcaaccacgaatctacttaatgtctctggattgaccggtcctggacatttcatataagtagatcacacaatatgtggcctttttgtctggygacttttgcttggcctcctatgttgcccaggctggtcttgaactcctgaagttaagcagtcctcttgcctcagcctcccaaagcgagcatatgctttgggaaccagtattgcatttttttgtgaaaaaaaaaaaaaacaaaactatttctattgatttctacttgtggtaaagtataaataatgtacaatttgccatctt

SEQ ID NO: 72 - DNA, 401 bp, Homo sapiens
tagagctcagtcttcccagatacatgacggtgtggcacttgaggaaaaaatggccctgtttgtggtcatttccaggtgagtttcaggatctttcgccatgaacagtaaaggccctcgggtttgtgttctcagcattctctattttctaaaaagatgatccaggggacattcagagatgatcttcagaacttacgctctagmgaggaaagactttacataagaaggactccatttcttcggcacttgctgtctgacctcacagacaagtagaccacaggaagactggaagggagccctgaggtgcttacagcacagccgtgtttcccatcagcacccagcccttgcagagagggctgacagacactttggctggaaaaaacagtgttttaaaaaatctctgc

SEQ ID NO: 73 - DNA, 401 bp, Homo sapiens
ttggaccgtgccactgtagaacattcctatcatcacagaaagttctgctggaaagtactgatcaagccactgcagagattttttaaaacactgttttttccagccaaagtgtctgtcagccctctctgcaagggctgggtgctgatgggaaacacggctgtgctgtaagcacctcagggctcccttccagtcttcctgtgktctacttgtctgtgaggtcagacagcaagtgccgaagaaatggagtccttcttatgtaaagtctttcctctctagagcgtaagttctgaagatcatctctgaatgtcccctggatcatctttttagaaaatagagaatgctgagaacacaaacccgagggcctttactgttcatggcgaaagatcctgaaactcacctgg

SEQ ID NO: 74 - DNA, 401 bp, Homo sapiens
atttgaacaaagttgtactttggtaattcttctgcctctgtgaacctttaaccttggggtttcttttcgagccagggctgcattgtcaccagtcgtccctgctggggctttcaaagagcattgtctagggcgtctgttttcactttgctactggagttcttttgaggaagggtattaattcagacctgactctgagacagracgagcacttttaaacttgccccagagcttggggatggggaaatgagcgtaatgcaagcctgtggctgatgccagtaattgttctgcaaatagtctgtgagggtgaagggagaagaggccctccagaggcagaggaatgtgccagctgtccagtgggaggccacagctttgcccagggtttgttgactacatgacaaaaa

SEQ ID NO: 75 - DNA, 401 bp, Homo sapiens
caaaactgggacttccagagagtccagatatatgcatctgtccaaatatacctgcaacaccaggtctgctgtgtgaaaaccagctgataccctctcactcgtagctagccccaggagatgtccagcctcaggaccctcatgtgtgctacacctttggtctggaacacctcccaacattccagggacgggcttttgtgccayagtttagcttcagctttattgcttcagaaaggccttccctggcctccaaactaaagtagatgccccacatccattagtccctatctgggcatcctgtcttgtcctgcttagcacttacataatttataattccgcatgttttatttacttctgtaccatctgcctccccaactagacaggaagctacatgaaagcagaag

SEQ ID NO: 76 - DNA, 401 bp, Homo sapiens
catttttcacaactctgtgattgtgtttggtcattaaacattggcccactggctgcttatgacttgaatgccacatggaggttaaggacacattcctgaaccactaactcaagaattagacatcagagatactaagtatctaacatcatagaattgtaaataaaattcccctgacacctagacctcgtctcactcctggtyagtgctcctttccctgcatagcctcacagagcacaggcccttcatgcttccctccatcccctttcctgcggggctgcctcttgggctgaaggcaatgcatggcggtggggcaggcggcatattttgccttttctttttcctccagaaacaagtttggcatgggacttggtcagtcttgatctgtgcctggaagtgtgaag

SEQ ID NO: 77 - DNA, 401 bp, Homo sapiens
gtgggtggatcacctgaagcaggagttcgagaccagcctagccaacatgacgaaaccccgtctctactaaaactacaaaaattagccatgcgtgtgtaatcccagctacttgagaggctgaggcatgagactgcactccagcctgggtggcagagtgagaccacgtctaaaaaaaaaaaaagctttcttgggataccagtktggtcttctggtgacagaaccttgcccataggttagaggaaataatactttcagcaacacccccagcttgggggatctcagaaagaagggcatgttgccaacttttgaggatttgtctgagaaacagcaacctggcatccccctaactccctgctttttttccctctagaatcaaatagaatctcttttcctggcaaaga

SEQ ID NO: 78 - DNA, 401 bp, Homo sapiens
agaccagcctagccaacatgacgaaaccccgtctctactaaaactacaaaaattagccatgcgtgtgtaatcccagctacttgagaggctgaggcatgagactgcactccagcctgggtggcagagtgagaccacgtctaaaaaaaaaaaaagctttcttgggataccagtttggtcttctggtgacagaaccttgcccayaggttagaggaaataatactttcagcaacacccccagcttgggggatctcagaaagaagggcatgttgccaacttttgaggatttgtctgagaaacagcaacctggcatccccctaactccctgctttttttccctctagaatcaaatagaatctcttttcctggcaaagatttcctagataaaaagaggtactacttag

SEQ ID NO: 79 - DNA, 401 bp, Homo sapiens
taaaaaaaaaaaaagctttcttgggataccagtttggtcttctggtgacagaaccttgcccataggttagaggaaataatactttcagcaacacccccagcttgggggatctcagaaagaagggcatgttgccaacttttgaggatttgtctgagaaacagcaacctggcatccccctaactccctgctttttttccctcwagaatcaaatagaatctcttttcctggcaaagatttcctagataaaaagaggtactacttagtcatttttgtaggttcgttaatagtttctaaaagtttttaaaagtacataataagaaaacttgttatggcaaccaataaagtttcttttcgaggaatgaatattttctaggaaagataagagtcagttatgtttggtc

SEQ ID NO: 80 - DNA, 401 bp, Homo sapiens
caatgccactgtcctttgttatctgtgggggattgatttgaggacccctgaaggaccaaaatctgaggatgcttaaggccctgatataaaatgacagagtattttcatataacttatgcatatcctcccatatatttaaatcatctctagatcacttgtaactaataaaataaaaatgctatgtaaatagttgctatactytattgtgtttttaaacatatcatttttttgttgttgaattgttatttttgttgttttcattttttttttttttaatattttcaatcttcaattggttgaatccacagatttggagggccagctatgtctttctggcttaaaagtctctatagaaaaacaccatggaagaacttaaaaaggcaaatcattatacaaaagca

SEQ ID NO: 81 - DNA, 401 bp, Homo sapiens
ctctgagcctgtctgtgcacctcaaatgcagatgattatctcacagggtggttgcatcaaagatgtccataaataaagcttcaggcacatagtagggagcagttattgttttgtttgtttattttttgtagagccaagcgcttgctgtgttgcgcaggttggtctcaaactcctgggctcaagtgatcctcctgctttgastgcccaaagtgctgggattacaggtgtgaaccactgtgactggctgggagcagttactgtgccaatgatctctctgacccctgacgaattataagcatatggaggtggtggggcactgttggacatgaggatggagacacagacactgattcttgattgcagacaaaccagttctttctggattattcatttatttgatt

SEQ ID NO: 82 - DNA, 401 bp, Homo sapiens
agggagtatgtctataagatagatgccacataagctgtggaatgtattagtatgtgtgacatccctgtggtcttttaattgatcagtggcatttaatgcaaaatttgaatctgaccacacaaagtagggagaaccctgggtggccttcatgtttgcttccccgtgaagctcctgtcctggcttttattagaagggtctggrtaggaaaagaagggttttgagctgaaggctttcaaaagaggcccatgccatgtttttccgggaacatagtttctaaaaaaatgctggaaccatcagtttccaaaggagcctggtttgtgaggggaatgaaaagttgttcctgcgtgtggattctgggttgttttccatcttcactccctaaggcagggctggcaagcggg

SEQ ID NO: 83 - DNA, 401 bp, Homo sapiens
ttagtatgtgtgacatccctgtggtcttttaattgatcagtggcatttaatgcaaaatttgaatctgaccacacaaagtagggagaaccctgggtggccttcatgtttgcttccccgtgaagctcctgtcctggcttttattagaagggtctgggtaggaaaagaagggttttgagctgaaggctttcaaaagaggcccaygccatgtttttccgggaacatagtttctaaaaaaatgctggaaccatcagtttccaaaggagcctggtttgtgaggggaatgaaaagttgttcctgcgtgtggattctgggttgttttccatcttcactccctaaggcagggctggcaagcggggaatgggacagatgttttgtggtagtaatttccagtcagattcttg

SEQ ID NO: 84 - DNA, 401 bp, Homo sapiens
gaacttcccagagagtggagaagctgcagcacaacaggcctgggctctggagtcaggaagattgaaattggaatcttggcccttctgctggctttttgtattactgtggacgtgtagcttttctgagccttcatttcttcacctgtttaaaacaggagagaaagggaataatgcctaccttcgggtttgctgttagagttwgcagtaactgtgatacagttagcatcattctgggtgcaaggtagacacttggtaaatggaagcaggccttactgtagggttagtgcactgcaggcttggcaccagaatgtagccacttctgaagtccttggggcagtcaaaagtcctcttccctcagcattgcagacagcaggaaagagcattgcaattatgcaagagct

SEQ ID NO: 85 - DNA, 401 bp, Homo sapiens
ttcctgtcatcacatatttttgggtacatttgcatgtagcagtgattggtacctatcagtgtgcaaacataaaacaagccactgcttccagcagactggtctctcccggcagacaaggcgtgtggcttgctaacactccacccacatttctcttctggtgtgtgtcttctggttgggtcttttcccttcgtggccttcttygtcttaactctaactgcactcacaattttacagccgatcaacgcagttaagctcccatactctgattacttcaagtatattaatttagtttctctccaatcggattatcaccaatttaaaaacagagacaaaaatcatatgttacacgtggtatcagagaccatccatctagcctgccttcccaaccaaaaaaaaaagga

SEQ ID NO: 86 - DNA, 401 bp, Homo sapiens
acaacagctggagggagccaaaggcagtgaattacagatgtgcagtgccattgagttgcagcttcctctgcccttgactcagtgcaagagactccaggccctgcatcgatgggaccaggcaggcctgtgaaaggagcagagcagcaggtccagagccagcagaacctgcgagctagtgtgccattgaggcctgggaattgytgctttactccagaagacagggaacctggtggtacagcaggaaggcatagtctttgaaaatcagatgtgacttaaaaatgaatttaaaaaaagggggctaatgaagtcctgaaggcctttatttctgtatttattgtggagatctttttcttctgaaagctttgatttgaccatctgcctcatttcaggagtttggagac

SEQ ID NO: 87 - DNA, 401 bp, Homo sapiens
atagagcgagacttcgtatcaaaaaacaaacaaacaaaaagaaacaaagaaaaacaaaaacaaaaacaaacatggcttgacaacattaaccctgtattgctcatgtttcatttcttattcctcaggacatttctgaagttaaagaaacccagcctcagtgtgatgaggaccgccccccaccagcccaggtgggctgtgcayaaggatcagacatactgggggagcagtgatccaacaagaaagacctttcaaaggagagacacttcaaaactccttatcgccgtctccactagccaacgccaagttctacttccattttatatcaccgcttctcttttgtttttgttgtgtttctaaatctggatcaggatggagactggcagtatcccttgagaaaagag

SEQ ID NO: 88 - DNA, 401 bp, Homo sapiens
atgttgtagcatgtgtcagaatttccttttttaaggctgaataatattcctttgtatatatattttcccatgttttaaaagtatagggtaagtatgtaagtatctatcagtatatttatttatagccatctctgtagttctgtattttgctttggcttaacgtgtatttttcaagttattacttaaattttgtgagtattrttagtgataccatactgttctgattctgtttaaaatgaaggacattttttttccttatctcttatagaatgaactagctgtattacactgtttgcatatttctagaattgacatttccaagggacagtttagaaattctcaattgtatcacaaactctgcagtgattgtattttgcaccttacccagacatggtaagaaa

SEQ ID NO: 89 - DNA, 401 bp, Homo sapiens
ttaacgtgtatttttcaagttattacttaaattttgtgagtattgttagtgataccatactgttctgattctgtttaaaatgaaggacattttttttccttatctcttatagaatgaactagctgtattacactgtttgcatatttctagaattgacatttccaagggacagtttagaaattctcaattgtatcacaaacyctgcagtgattgtattttgcaccttacccagacatggtaagaaatacaggtctggcatggcatgatggctcatggctgtaatcccagcattttgggaggctgaagctagagattgtttgagcccaggagtttgaggctacagtgtgctatgattgtgtcactgcactccagcttgggtaacggagcgagatcctgaaaga

SEQ ID NO: 90 - DNA, 401 bp, Homo sapiens
gccagacacgaaaggtcataaagtatatataattccatttaattcacgtcattgcactccagcctgggtgataagagtgaaactctgtctcaaaaaagaaaaaaaaaaagtttctaaaaaaatatgatatggttgcacacaaaagaatattctattataaattaatgtcacagaaaaagtctgttttattgcttagtaaaragaaggtatatatgaagtgcttcataatattaagttataaaatgatgaataaattaaaataattatccccccaaaagataattctgtacatacataaatatatcatacattatataataccccagcagcgatggggccattccctataatcaaacattaaatattcacactaaatgggaaaaataaaagattcagtcagt

SEQ ID NO: 91 - DNA, 401 bp, Homo sapiens
ctttaaaaaaaaaatagttcagaataaggctagacatataaatcaatgaaatattgagaatctagaaagagactttcacatttacagtcaactgatttttgttaagagtgccaacacaaatcaatagagggaacagtttttttaacaaaaactgggacaaccagatatccacaagctaaagaattaagttggacctctacytcatgccatatacaaaaatcaactccaaatagatgaaagacttaaatggaagagctaaaactataaaactgagaagaaaacataggtatgcatctatgtaaccttggattaagcacttatttcttagatatgacaccaaaagcacaagcaacaaaagtaaataaataaacttgaatgtttcaaaaattaaaagcttctgt

SEQ ID NO: 92 - DNA, 401 bp, Homo sapiens
tcagtagcaatctactattattacctaatccctaagccgctgggggaaaatgtttcagaatttagaactttaaaaaaaaaatagttcagaataaggctagacatataaatcaatgaaatattgagaatctagaaagagactttcacatttacagtcaactgatttttgttaagagtgccaacacaaatcaatagagggaayagtttttttaacaaaaactgggacaaccagatatccacaagctaaagaattaagttggacctctacttcatgccatatacaaaaatcaactccaaatagatgaaagacttaaatggaagagctaaaactataaaactgagaagaaaacataggtatgcatctatgtaaccttggattaagcacttatttcttagatatga

SEQ ID NO: 93 - DNA, 401 bp, Homo sapiens
cctaagctgtcattatgcattgtgtgaatggagttttgtcttctgcgaggcgcttgtcaaggagggagatgagcaatgtccagagaaccagtgctcacaggcctcctcctccacatggccagaggggctgcccacggactgagaaaggaaggacttgctcagcagatgattcagtgtcacttgatctgggcagcccctaayagcagtgcctgtcttgctgtgctggaagtatccaactttgggagccccccccatgtaaaggtactgggcaccgaggctgggctccatcagtgcctgggggtctacccctacctgtccaactcccctacagactcacaagggaggaaaggcagtccatgctgaaccatcctttgcacacaatagcccctctatcaaactcc

SEQ ID NO: 94 - DNA, 401 bp, Homo sapiens
aaggacagcataagtgaagtctggggagtcccactccttgggaggaggacacagtcactaacagcaaggtccctgagtgtggccaccctgcagaggattcatgcaagccgtcccatttaaccctgaagggacatgatggaattcccatgttgtcacgtaagatcatgtagctggtaagggacagtgccaacatttgaaccyaggctctaaaacccaggctcttttctaccagtgctgtacagtccctgtttaaagcaagcagatgcccccctgccctgaagcttggatagtctccagaaagaaaaatacctgttaggatgctttacacattattactactacccaccaatttcaagaatgtcttccttttctacccaagtagactaaaagtattgggggtg

SEQ ID NO: 95 - DNA, 401 bp, Homo sapiens
tgtgctgggaaaaagaacaatggcctcaggacagcacagatcctcaatccaggtgggagctcagcaccctccagctgggaaggctgtggtgtccaagctctccggaagtcccaagaggctcagacacctcccagccttattttctccattaaaaacaccatgtgggcaccctgtcttttttatgagctgaaaagatttcaygtcccaagacggaagagaggagaaattggggtgcaaaacttacctccacaccaggaatattgggtaagtgcagcctttgtggcagcttagctttatgtcatttttggttgggttttttcttcttcattcaagttgggggatgggggaagatggtcttccctctatcccccaagataagattttacttgcacagaaaaccg

SEQ ID NO: 96 - DNA, 401 bp, Homo sapiens
tgtctgagcctcttgggacttccggagagcttggacaccacagccttcccagctggagggtgctgagctcccacctggattgaggatctgtgctgtcctgaggccattgttctttttcccagcacaggatggaaaaggctcctctgggaggcatctgcaggtcagatgcttttggggtggcagggtgcagcagtggctggrtgggactgggatggttgttttaacaataagttattagagaacttcagcttggccctgcctttcagggaactaattctgggaaatctatctggatcctgaaataagttctgctttgtgatttcataattcctctttcagggaataatctgaaatgagccagagctttatgcacaaaaatgttcttcacagcattatttata

SEQ ID NO: 97 - DNA, 401 bp, Homo sapiens
gcacccttctttaaaatgatatttatgaagaaaatttaaaaatgtgaaaagtcatcctacatatgttaagtgaaaaaaagcagggcaaggaattctttttgagttcagtaatatacaaaatacatatgtgcaagaaaaagactagaaagaaagacattaaatgttaacagtagctaacattaggggctaagatctaggtgrcttttaatttccttttataaagaattttttttccccaaggctttttctttcccaatgttattttctaaaatttctacaatgaacattattagttgaatagttaccctcctccctcctcgctcctccttcttggagctggtcagccagtgctgcttttctcctcctcccacccctccccttctcccacccgagcactgtgg

SEQ ID NO: 98 - DNA, 401 bp, Homo sapiens
agaagggccagagctctccccagtttctcaaagagctctctaatcactaatctagacatgccagtctcactcttgccatgaagtctgggacaaatcccttgtctctaccatcttgacctcaagcccaagccccaacctatcttccaaggatattatataggaaggtttagccactgaaaactgacagagggaaacacttaygcaataactacacttgtgaatgggaggcgccttcatctccattatggagagaggagacgaggctcagcagaggttcgcagagcctggattcccctgtgtctgtcaggtcccacacattccgccagataaaatgcatctggtagacgacagtggctccaagtttggctttggagtgtccttttatctgctgatcaccaaat

SEQ ID NO: 99 - DNA, 401 bp, Homo sapiens
gagatgaaggcgcctcccattcacaagtgtagttattgcataagtgtttccctctgtcagttttcagtggctaaaccttcctatataatatccttggaagataggttggggcttgggcttgaggtcaagatggtagagacaagggatttgtcccagacttcatggcaagagtgagactggcatgtctagattagtgattasagagctctttgagaaactggggagagctctggcccttctcccaaacagaacgcatataactatttcaggaagtgtttggacccaagatgaagaactgctcttcaagaagcaaccgtggcctggctagacttgggcaatggcatgaccctgtgggtattgcccccaccgcctttctgcgagggcctgcaaaacggggccct

SEQ ID NO: 100 - DNA, 401 bp, Homo sapiens
catgtctagattagtgattagagagctctttgagaaactggggagagctctggcccttctcccaaacagaacgcatataactatttcaggaagtgtttggacccaagatgaagaactgctcttcaagaagcaaccgtggcctggctagacttgggcaatggcatgaccctgtgggtattgcccccaccgcctttctgcgarggcctgcaaaacggggcccttgtccacgtgtgtgggtcagtgctgtagccaggaggaaggcctgagacagtgtgtctgtgactctctgctgtttgattgtgtgagagtctgtatgtgaagaggaaaataaaaaggaaatgaaaccaatttataataattgtcttctgacatatataactccaaaaaactgcaaagacaag

SEQ ID NO: 101 - DNA, 401 bp, Homo sapiens
atatatttaaatacaaagtcacttttttctgattataaaactaatacagacctattttagaaactttgggtaataacagtataaggaagaaaataataatcatctggtttacttgatggaaattaaacatttcatgtaattttttttggctgcttttaaatttaacattatatcctaaacatttttcccatgccattaatyactttctgtaaacatcattttttcatgcctgcaggagttccattgtatgaatacacaatttaagtgtttggttgtgtggaaagcatataagctctgacttgaagaaatgtgacccaaacctgtgtctgtcacttactggcactcgatggcctctggaacctcagtctccttgtctgcagaagggagactgaatgacagta

SEQ ID NO: 102 - DNA, 401 bp, Homo sapiens
gtccattgtttagcagagagggcaatctatgcaggcaggactggctggcgacaggactgccttcccatcagaaataagatttaccaaaaccgggggacctggggcagacctcaaccctgagctccatttactgatgatgatgcagaacacagcatccaggtgagaatcagattgttgctaccctgggccatgacaagaaayggggcttgaaagaaagaggccagtcagtcatggagtcagtggcactggtcttctcgtaccgttaatggtgggagtgtagattggtacagccttctgagaagaaattggatcagagatgtaaaaatgcgtatttccggccgggcgcagtggctcacacctgtaatcctagcactttaggtggccaagatggccaggtcact

SEQ ID NO: 103 - DNA, 401 bp, Homo sapiens
gagtacctgggactataggcatgcgccaccgcacccagctaatttttgtatttttagtagagacagggtttcactgtgttgaccaggctggtctccatctcctgacctcaggtgatccgcctgcctcggtctcccaaagtgctgggattacaggcttgagctaccacacctggcctgtgtgtatgttttttcaagtgtgtrcattttttgtgcatttttacatgtcaacacaccctgtttgtttttaaaccttttttctcactacaaagcttctatgactccagcattttataaatgccttcagagaatgcaagagcctcctcacccctttacggtgatgttaacagagggttggtgcctattcatctgactttgtccacatatatgtatatttatgctta

SEQ ID NO: 104 - DNA, 401 bp, Homo sapiens
ccatctcaaaaaaaaaagagattcatgttagagtttggagaaagatttccttgtgttaccgccacagaactggaggtctggctcatagcagacggacaataaatatatccagagtgaaagctgactgatcttgaagctagacttttcaaattcaagtttataagcccaggtgtgtatgatggtgtcaggcacagaaagtcrtaagataaacgtagccctgagattttagacaaagctttacttttcctcggtggtaactcacttaaaataatatttttaggctgggcacggtggctcacgcctgtaatcccagcactttgggaggccgagatgggtggatcacctgaggtcaggagttcaaggccagcctggccaaagtgccaaaacgctgtctctactaa

SEQ ID NO: 105 - DNA, 401 bp, Homo sapiens
agcacacccagaactctgggtcagagatgcctcacttcccatctcctatctctgccccatcctgtatgtgtactcattacctagtaccctggcaggaaagtgagtgtagagcaattagagagcatggtgttgcccaaagtataggacataccctgccagattttaggtgacacacactttttttattatggtagttaggtrtttattttaatatgcactgaaggaaaatggaattagtattttaaactcattatttcaaggctaatattacttaggagaaggttaaataaatagtctgtttaaagtaaacataataataatactaataaaggtggtgcatggataagatgaaaattgcaaaggtggggactgtgaccaactcaagtccaggatcaccagca

SEQ ID NO: 106 - DNA, 401 bp, Homo sapiens
atcttatccatgcaccacctttattagtattattattatgtttactttaaacagactatttatttaaccttctcctaagtaatattagccttgaaataatgagtttaaaatactaattccattttccttcagtgcatattaaaataaatacctaactaccataataaaaaaagtgtgtgtcacctaaaatctggcagggtrtgtcctatactttgggcaacaccatgctctctaattgctctacactcactttcctgccagggtactaggtaatgagtacacatacaggatggggcagagataggagatgggaagtgaggcatctctgacccagagttctgggtgtgcttaagaaaaaaaaaaaagaatctcatagcagagatcctgtggtggtatctaat

SEQ ID NO: 107 - DNA, 401 bp, Homo sapiens
ttaagagcacagattctagcaccatactacttgaatcctggctccatcacttgcttgttttgggatcttaagctggtgacttacccactttttacctcagcttcttatctgtaaaataaggataataatattgtatgtacttatgacagtcattgtaaggattaatgaattagtatgtaaagtacttaacacaaagcctgytgcatagtcaactctcaataaatattaactgttattattgctatggttactgatatttgtattgctttaattatgacatttatttcttaatttttggcagaatttccttgcttgttttagcttgccgtaagattaggtatttccctctctctccttgtgtctgaggtagggttctttcagagttttgctgtttgtcacag

SEQ ID NO: 108 - DNA, 401 bp, Homo sapiens
ggtgtgtggagcaggattgtgtgaggcacaatctggaacacctttctgggaagagactgtccagagagcttagatccatctgccctgggcaaaatctggtaatatttataaacaaccctgtgttagaattctcctaggcctccaggaagaggcaggagctcctctttgtgcttggcttgcttggaggcatttgaccaatcrttaacctcccaaaattacccttgtttttatcaggcgcgttttgaacttgaatctaggcattagaggaaggggtgttgggaaaggttccatctctgctgtgggattaacttggcttggagcaagccagtcacttctgtctgtgtgagcacagaacacaaatctgttttgaaaactggacctacctgaaggaaagatgatga

SEQ ID NO: 109 - DNA, 401 bp, Homo sapiens
ttctctctcttcctccctccatctctctctttccctcccccctccctccattttcttccctccatcttcctgactccttgctttcaattgtctggcttcagtttcccttggctctgtgagagcaggtctctggagtgtgttgcccatcttgtggctcccctaggaggttatgttaactgtgaactatgaagaggagccacrttgtttgttttttaacacccactcgattataaattgccagggaggcttggactcttgggtcgctaaggtgaggatccaattttgagatctgcaaaattgggtcaaaatctcattgcatctttaagcctttcccctctcccacagacacattgcatacacacacacacacacacacacacacacacacacacacgcttaac

SEQ ID NO: 110 - DNA, 401 bp, Homo sapiens
gctaaggtgaggatccaattttgagatctgcaaaattgggtcaaaatctcattgcatctttaagcctttcccctctcccacagacacattgcatacacacacacacacacacacacacacacacacacacacgcttaacaagataaggataacgtaaactagacctttcttttgacttaatgtttttgttccatgttggcrttcaaagcaggaacacagggtgctatctgacaaagcttttcttctttgctgttcagaatttccatttggagtttactaagccaggactgataatgggtagacagctcagtaaaattctagatgagaagatctctgttaataatcacggacccctgagaatttctgaaaggttctagagagagtttcgacattcatctggc

SEQ ID NO: 111 - DNA, 401 bp, Homo sapiens
aggcaggaaatccattgtttaagaaaaaaagaagcccaggggagaaatgcagaggtctgggctttggggctatgcccatagaatggtaggagaaactgtttcgttatttagtagagagaatggcaggactgggggacaaacagagaagggggtcccagaaatgacttggcttggtctcctggagaggtcatagcagctcaractgaggttggtagttggcagagaggcagattgagtagttggcagagaggcacgctgacttgaggcttctgcaggaagtcagtatgtaggtgtccaggggagtaagggattatgtgtatgtaactccagatctctggtgggtggaaagagaactgattttagagccaggtaaatctgtgcatgacccatggcttcacccc

SEQ ID NO: 112 - DNA, 401 bp, Homo sapiens
aggagaaactgtttcgttatttagtagagagaatggcaggactgggggacaaacagagaagggggtcccagaaatgacttggcttggtctcctggagaggtcatagcagctcagactgaggttggtagttggcagagaggcagattgagtagttggcagagaggcacgctgacttgaggcttctgcaggaagtcagtatgkaggtgtccaggggagtaagggattatgtgtatgtaactccagatctctggtgggtggaaagagaactgattttagagccaggtaaatctgtgcatgacccatggcttcacccctcacatctaggatcttggtttcctttttcgacggtgaaaaattgtaaaccccaaccttaaggatgattgggaaggttactagtggta

SEQ ID NO: 113 - DNA, 401 bp, Homo sapiens
catatacttcttttctttttcttttctttttttttttttttttttttttttttttgagacagagtcttgctgtgttgcacaggctggagtgcagtggcatgatcttggctcactgtaagctccgcctcccgggttcatgccattctcctgcctcagcctcctcagtggctgggactacaggtgcccgccaccaagcccgamtacttttttttgtatttttagtagagacaaggtttcaccatgttagccaggatagtctcgatctcctgacctcatgatctgcctgcctcggcctcccaaagtgctggcattacaggcgtgagccactgcgcccagccagaaatacatacacttcttaacactcacagaatgttggtgtgaaatgggagtttggaaacgtc

SEQ ID NO: 114 - DNA, 401 bp, Homo sapiens
ctcgaatgccatttttaaaaacattgaacagaaggccaaagcaaaagccctgtttctaaaccagatcttctccatgtcgacatagggcttttaacaaatgttcttaggatgtgactgctcattcggttttaaatccttttcctgggtggccctcactccattactttatgcactcaatatcagggagaggtaccagcagcyttcctgaggtgaagatcaaaagcagggctctgagtccaacaagagccctctggggcccttccagaccagagcacttctgtgaagcagaggcccagaggcttacaggccagcagaagcatggtggctggtctctaaggagcaacacatgaagttcactctggtactaaaggtagtggcaggaacacctctgatgagggtca

SEQ ID NO: 115 - DNA, 401 bp, Homo sapiens
tccttagagaccagccaccatgcttctgctggcctgtaagcctctgggcctctgcttcacagaagtgctctggtctggaagggccccagagggctcttgttggactcagagccctgcttttgatcttcacctcaggaaggctgctggtacctctccctgatattgagtgcataaagtaatggagtgagggccacccaggaraaggatttaaaaccgaatgagcagtcacatcctaagaacatttgttaaaagccctatgtcgacatggagaagatctggtttagaaacagggcttttgctttggccttctgttcaatgtttttaaaaatggcattcgagaggagtaaaagcatgtttggaggtatagtttctaccctctttgagacagcagaatcaaaatt

SEQ ID NO: 116 - DNA, 401 bp, Homo sapiens
atagaattacctgggatctcttcatttcccggagggaaactggaaattatcttgctctgtgccacctgaaagctataaggaaggctctttgaagatggtggtgggcagcacttacagctgcgatctggtgttcctctgggtgcactgataccagtgaatgattttcctgaggaggaggaggtaacagcaaaatcatgtaayatcagaaacctttgttgaagatggatgtgggaaagttgaggtggctggtgaggagttgaattagaagacatagtatttcattattgtggttgtaataatgttggtgagattatacaccaatatccagccctgaagtgtagtctcttcacctccttgcctttctgccatgttaatagtacctggaccacacatttgggatc

SEQ ID NO: 117 - DNA, 401 bp, Homo sapiens
aaactggaaattatcttgctctgtgccacctgaaagctataaggaaggctctttgaagatggtggtgggcagcacttacagctgcgatctggtgttcctctgggtgcactgataccagtgaatgattttcctgaggaggaggaggtaacagcaaaatcatgtaacatcagaaacctttgttgaagatggatgtgggaaagktgaggtggctggtgaggagttgaattagaagacatagtatttcattattgtggttgtaataatgttggtgagattatacaccaatatccagccctgaagtgtagtctcttcacctccttgcctttctgccatgttaatagtacctggaccacacatttgggatctcaattatattatggctctcagcaaccctaattggt

SEQ ID NO: 118 - DNA, 401 bp, Homo sapiens
ttggttcatggatatatgtcttatttgaaggtgattgcatgcacttgaatgttagggggtgaagctccttttgtgtctctctgcctgcatttaagatgagattgagcacacagaggcaacatggccttccctgggggaaggaacctgggtctgaattcagaggacttgggttaggatcctggctccactccctagtgtctrtgtgactttggataaaatgatgatgattatgacggtgatggcagaagttaactacttcataggatcctgtctgtgaagtaagggtagtcatagtgcaccttggacagcgttgatggatcagatgagatgatgcacatgagtagtcagttcactggcatggaacatgctataaagctattaaaataatgatgcttgagttg

SEQ ID NO: 119 - DNA, 401 bp, Homo sapiens
agaggcaacatggccttccctgggggaaggaacctgggtctgaattcagaggacttgggttaggatcctggctccactccctagtgtctatgtgactttggataaaatgatgatgattatgacggtgatggcagaagttaactacttcataggatcctgtctgtgaagtaagggtagtcatagtgcaccttggacagcgtygatggatcagatgagatgatgcacatgagtagtcagttcactggcatggaacatgctataaagctattaaaataatgatgcttgagttgaactgcattgttaaaacatgggctaatacactgtattagtctataatctgtggttataaaggacaaaaatccaccccaaactgattcttaaaaccaggaagtttgtgagga

SEQ ID NO: 120 - DNA, 401 bp, Homo sapiens
taggacactgccccattttccagattgcttacctcatgctggcttaattcttaggccacccggctcctgtgagattgcagagctgccatccattctgcttgctttctgccaagtttgcccctctcacagaaagagatatttcctagttcagcaaaaagcacaggagagactgagtggccagctctaggtcccacgcctatmcctggagctgggaccagagttcctactgtctaaacattagggactgagaaggggagagaggcgatcctaaagggaaagagaccctgtgccagtggagtgctaggtctccataacaatggggatgcatagttcttgcatgggtttccaaatctctcagaggaggagaatttctcatacatcacacagcccagcagatccac

SEQ ID NO: 121 - DNA, 401 bp, Homo sapiens
gggacatcactgtggctgtctggtatggagagccacctgctccaacttgggcttagcatgcccagcccaggcacagctctgctgctcccaacaaatccttttactagagccaccttgagctagtttcggcttctacaaccaatcaagcctaaactgcagctccagatctgcagactggttagtggacatgaaaccaccccscagtggaaaatgagcttggtgactggccaagctttgatgttcctccatcccacaactggcccgagtctcaatttgtttatttttctgtataacttttgcagtgtttcaactaaatgggacagtttttatcaacagtttcctgagcaagaaaaatagcagaatgcttggtttgaaatgaagactggtggatctgctgggct

SEQ ID NO: 122 - DNA, 401 bp, Homo sapiens
aggatttgttgggagcagcagagctgtgcctgggctgggcatgctaagcccaagttggagcaggtggctctccataccagacagccacagtgatgtccctgctaggccttccacctgcctcagccacgttacctgcccacccacctgcccctctgcccctcgaccagcccactcacgcctgtactgtcctctgatggctgsccgtacatggggtctctgtcacacccttagcctcagtgcccagctcactggccctgtttcccagtgaattgcttgcaagagcctcaggggagccctgttggccctgctcacagaggtcacatgacattggtcagtttctgactagagcactcttgggacagatctccgtgtggtccccatagttgtgactgattgaaggc

SEQ ID NO: 123 - DNA, 401 bp, Homo sapiens
aagaactactccggaaacagctggtaacaggacaccgtactttcagcctttctttcttcattgttgccagaaaataatcagctctatatcttaagtgcttgatagagtggccagacaccagctgtaacttaaaacaatttttgtcttagttgctttaagcaaacagatgcggctagctttctgggccaagcgcagtgtccmtgtcttagagtggactactcaagctgctcaaccgtcttgatttatgtttaattcttgctttagatgtgtccattcagacattcctttggtatgtttccagaggcttgggtttggggtttgaaggagtgattccggactggccgttggtttgcttgttcattgtttcggcacttaagtgtgctgcgtgtgtcaggagcagg

SEQ ID NO: 124 - DNA, 401 bp, Homo sapiens
ccatttgcaactcttagcttattatttttatataatctttacaccatgtttattgtgctactttttgtttggctttagacattatctgtagacttcctgctaaggaacataagaattcttctctttcttatgtcctccttcagttaggcattccctcagaactttcagcacatggtggggcactgtgctctgtacataatrtccagcgcctgccgtcaggaagctcacggtgcagtggggagatggaccttggaagagaccacgagaggaggctatgccgaggcctgagcagaggagtggacgttctgtgctggatgcctctgctcggactttgcctccctctatggctgagcggactcattcaggcagtgtgctttggtgcagtggtaccatttccccag

SEQ ID NO: 125 - DNA, 401 bp, Homo sapiens
ctcggactttgcctccctctatggctgagcggactcattcaggcagtgtgctttggtgcagtggtaccatttccccagtgctatcctggccccagccacctcatctcccattggagtgatggcagcaactgccctctggcctccctgttgccattctgtcctttgatatacattgtccacacagcacagagtgaccttttraaacatccatcagggttatatcactcccccacttgaaaaactgcccttggccttctgttaacagtaaaatacaatcctgactccatactgcagccttcaaggctcctggtgacccagcccactcctgtcacccccatttggcttgctgtctgcagccacttgggtcttccttctccccctcagacctgctcctcacttgg

SEQ ID NO: 126 - DNA, 401 bp, Homo sapiens
gaaatgctggataaagtgaggaaacactaagagaagaaaaaatatgcagccaggtggagaagcaagaaaggagcatcttcaagagctagactagaaaaggaggtcaaattctcagcagggaatatgaatggaagccagttagttccaggggtatacagattggagatgtgaggttcacctggtaaattaagaaaaaagacmagaagttgcctgtaactggtggagattaaattgcttgctttgcgaggtgagctgagaaagtttccttcacccaggagaggacagaattcctgagattgcatggattcagatgcaggcctcatatcttcatcactggtgctaatggaaatcctcagccaagaaattaacatagaaactggtgactccttatggccctgggc

SEQ ID NO: 127 - DNA, 401 bp, Homo sapiens
atggaagccagttagttccaggggtatacagattggagatgtgaggttcacctggtaaattaagaaaaaagacaagaagttgcctgtaactggtggagattaaattgcttgctttgcgaggtgagctgagaaagtttccttcacccaggagaggacagaattcctgagattgcatggattcagatgcaggcctcatatctkcatcactggtgctaatggaaatcctcagccaagaaattaacatagaaactggtgactccttatggccctgggctgccgtagcccctgatctccctatgggggtgcctttacagttgcacacatgtgcaagcccccacagaaaacaacgtttgctgaagaggagtttacagacaaaattacatggcatacaggaaaaatta

SEQ ID NO: 128 - DNA, 401 bp, Homo sapiens
agatgcaggcctcatatcttcatcactggtgctaatggaaatcctcagccaagaaattaacatagaaactggtgactccttatggccctgggctgccgtagcccctgatctccctatgggggtgcctttacagttgcacacatgtgcaagcccccacagaaaacaacgtttgctgaagaggagtttacagacaaaattacrtggcatacaggaaaaattaccaccatgagaaagagaatctatggattctcaagtgggaaaactcagatcctggaaactagaaaccataaaacaatctgaaagagaatttaaaataagaatatttgaaatgtaaataaaggaatagaaattatagcaagattaggacattatgaaaaaagggtagataaatttgaaaacaa

SEQ ID NO: 129 - DNA, 401 bp, Homo sapiens
ttctgtgagttgttctagttaattatctaacctgaggaggtcatgggaaccccctggatttgcagccagctggtcagaagtgtgggtggcctagggacccctgaactggtagctggtagctgaagtgaaagcagtcttgctggggactgtacccttaagctatggagtctgaccattgactttaggtggtttgtgtcactrttgaattatggtatacaacttgtgatacatatttccaattgtgttataaagtttatgtacaaaattacaaaagagtgtacctttaagtaacgttgacaccactgggcttcagtatccttatgtatgaaatgggaaatttagtgacaacaacacagaaatgttgtatgattgtcttcgtaaagtgccttggaccagcacct

SEQ ID NO: 130 - DNA, 401 bp, Homo sapiens
tcttctttcaagaatgatagtaaatgcaattggtgtataagaggcccatcattttaatggaagaataaacgtcacagttctccagacttaattctgtattcaaatggttcctgtggtcacccttgggtcttttcatgcatgcatccttatccccaggttctcacttaacatttatcatgttcctattagatctgccttcarggaggttttatgtgaaaagtgaaaggtttcaaacatactcaggacaaagagaacaaacattcatgtacccatcaggcagactgaacagttactaagatttcaccgtgcttgtttcatctctctctcccctgcttttcttgctgaagtatttttaaacaaatttatgagatcttgagtcattttacccctgaatacttatg

SEQ ID NO: 131 - DNA, 401 bp, Homo sapiens
gatcttagctctgccatgcactcgctgtgtgttttgagcctgtgacttgacctctctgactgagtttccacctttggaagatggaattagagtgcttactttgcagggttgttgtgaagataatgtgaatgcagatgtaagcatccccagcaccgtgcctggcacatagtagctgtttataaatgcaaatataatgttgtstttatctgccagggaggaggacagagcaccagccacctctccatctctactgcactgtcccctggccccaagacctcttctgcatccccttcctctctcctctggtctggatggttaggcacccaggctttatggggcagggcattggagctgagaggacaccagctctgagcacctgcaggttttggagagaaggaaag

SEQ ID NO: 132 - DNA, 401 bp, Homo sapiens
gccttggatgagagttccttgacctctctgagtcttactctcttaatctgtaaagcggatatctgagggcccatcctcccctcattcagattactggggtcttctccaagtggatgcagtccttgcagcccctgagtcctctctctattggccctgggccactggatcttcacagcatttgattttctcttggcacagccrcttcagttgttcaacttttctccccttttttctgtttctaaacaagcatacataacctttttaagtgttactaggatgccaccactgaggactagagaagagttgattaattgttgctggagggggtgttctaagtaattgaacaggcccggtcatctctgacctctcagtgcttttcattcacttcatacatatttgtt

SEQ ID NO: 133 - DNA, 401 bp, Homo sapiens
ggctttctacctcctggggctatattgagactcagtatgaaaacctatgtttgaaattctagggaaaatccccactagagagaaaataatgtcagagactgtttggagctttcacatgcattaactccttcagtcctcctaacagtctatgaagtaggccctgtttttacacagcatatgtatactgtggctatgatactrggtgtggggcctcggtccagagtgttggggagcgagtgtttggcagcctctgcacggccttttcatcagctttggaagaagccaaggctagagagcgaagtgctctccccacgtggccccactggaggggcaagggctgagtgagattcgtctgctctcatttggaccccagagagcccattgtcctttcctccaggatg

SEQ ID NO: 134 - DNA, 401 bp, Homo sapiens
acagtttctgttctctcccgcctcagtccccttccccccattttaaccattttaggatttcctctagcactgaagagaaaataggattgtggaaaatgttcagttctcaagtgtcactaccactcagggcaagctcgattttaatgtgaacttcccattccgggtaagaggaaattcttcaattaataaaccgggtgtgcrgaggccagtctttaaggtttaatcaatttcatctgtacttaggataaaaagactgactattctacttttttcccctcgttttccttctttaaaaaaataataaaatgaatgttttattttaaattctttgaggttcgtatctcctgtttcaggaaatattgtctatttcatgcagtgagtatgaaaacttccccccaccc

SEQ ID NO: 135 - DNA, 401 bp, Homo sapiens
gctcctgtcagggccaaggagtccggggggtgatggctgcttatgtcgcctttccagatggaagcagacatgagggctctgtagggccacagggctcccaacctaaccagggagttttgcctttttgcttctttaagctaccgtgtcatagtctatctagggtaatctttttagctgactttgcacaacagtacaactccygttcaagagcagtgaaaaagagcagaaaatggaatttgaaatgtagaaataaaataattgtggcccataagctataatttgatttcatgctttaggcttccttaaaatgtacagtttctgttctctcccgcctcagtccccttccccccattttaaccattttaggatttcctctagcactgaagagaaaataggattgt

SEQ ID NO: 136 - DNA, 401 bp, Homo sapiens
aagtgacttgccctcagtcacacagctaacaaactggaggactggattagaacccaaacctccaactcaacaggagaacttgtaccatgatactaagcaatatcgcctgtctgccagagtctaagagcctgcatgcccaccatgaggctgagggaagaggaagttaaggagatgctcaaggtcagaggtagggacctatcyaatgtaggatgttccctatctaatgaaaatacaaaataaagtgatcttcaacagaagcatgagggagctcaggtagatctgtaagagaacttcctgagagcaagggctggtaaagatgtggatggataactggagacatgattaaagagctctttggctagaagttttcaaaacagctgatccacatcagggaagaagta

SEQ ID NO: 137 - DNA, 401 bp, Homo sapiens
ttgctacgtgtctggaagagcaaaaggtcagaaccagcctgactgcctgttggaagggaagtagttaactaaaccatgacatgtacataaaacagaacatgacccagctatttaaaaacaccacggtaactattcactgaatagagctctagcggagctggtgtgttcactgtgtgcacagtatattgccacttctagagratccgtgggagaaagaacatgcttaaaaatcatgaagtgtctttggaatctttagaagaaaatggttatagcaatttgcttccaggaagtaaactaggtaagcagggggaaaaggaagatttactttttactgtgtacctttttgtacctttaagattttgaactatgtacatacatacgttactgactcaagagcaatt

SEQ ID NO: 138 - DNA, 401 bp, Homo sapiens
aaacacccgcagagctgggagaggggagcagggcaggatgcaagtccatttgctggctgcacaatcttgggtaaggatctttccctctctgaccccaaggtccacatctggaaacagggacaatcacataattgtgataaagggacaatgggtagccatctagataaaaataaaattggatgtctaccatacacatgacaycagaataaattccaaatggatcaaggtttcaaacataaaaacagaaaaccaaaaaagtactgaaagaaagggtgagaaaaaaattttttataatcttaaaagtaaaaaaatacctaggtaagatacaaaacccacagaataaacacagaagaaaataaaaaggaaacactgacaaattcaacaatataataaccaaatat

SEQ ID NO: 139 - DNA, 401 bp, Homo sapiens
gctgcagtgagccgagactatgccactgcactctggcctgggcgacagagcaagctcaaagaaaaccccaaaaaaccccgaataacagccactgtggattgagagctgaattggagccaaggacttcacatcactggttgcaaactgacaacttaaagatgcctgaggatctggaatgggcattgtctagcctgtgcagtrcctgttagaatatgcatacactgccaacatttacaacttgagaaatgtcacataaaaatctccatgaattagcacatgtggttagactgggcctttgtctgatgtggctgaggagcagctgtctcctggagaacaggcatgcattcccaactttaccctggttcctgcaattccctattgcctcacaccccagcatttgt

SEQ ID NO: 140 - DNA, 401 bp, Homo sapiens
  misc_feature (201)..(201): Nucleotide optionally deleted
gactcactaaatgcaagctgctgcaagtatcactatgccagcacagtaagagctcaagaactggcctcctccttcctttaggactcacatatacccaaaggccttgtgccctccagaggaggaagaggaagagtattaacggcagcatggagcgaatacaaacagtgcctcccccaactcctgtggacccaggagctggcycctcacggggtttcttggtaagtgccagccaacagcctggatcactgtatccaccactgggcaggacatcctttttgtttgaactgccctgcaaaggcaggctcctccacaaacatcctggccaaatctcaccagacttgcagggagacccctgagcaggagaagctgacccggcagaactagacattgctgtcctggtc

SEQ ID NO: 141 - DNA, 401 bp, Homo sapiens
gtgataacaaggaccagggtccctggagccttctcctgtgactggggcctcctttggccacctggtccccactggagggtctgggcctggccaggagcctctagcctgttaaactcctagcacctcctgcagtcgatggagtaacctggtggttgttagcagcatgggcagcatgaatgtttggcttcagtgagagggctragcagaaaggctgagagagagtgcatgagtgtggcatgctgccctgtgcccaggtgggtgctaggtcacaggcactgtgcagggcctggtcgtgaccgccctccttctctcctcccctttccccttccccaactccatcagcaggctttgtccacttgtgtttgcctggggtctgcctggactagtggggacagcaggcc

SEQ ID NO: 142 - DNA, 401 bp, Homo sapiens
tggcacacatttacctacataacaaacctggtcatcctgcacatgtacccctgaacttaaaatataagttggaaataaatttttttttctttattttaaatgtaacattttttctccttcttataatgcccatagctttgacttttttaaaaaaaaatctgattttgaggttgctaaaatatgttcaaagtataatgttawgtttctccagctgaaatatttttttctgaacatattttattccttcagtcccaaaaggaaaattacacctcacagataacttatgctttgttaaatgctgacccttgtaagtttttcattatttttgaaatgattaagatatataatttacagaattggaaattgtaatttttaaatgtactgagaaactttaaccctat

SEQ ID NO: 143 - DNA, 401 bp, Homo sapiens
ctttgcccagaacacctgccccaggttcacttgcccctgatccttgatgccccacccggctccatgctgagggttcataaccaaggcctgggttttcaatctgtattcacagcacaagacccagcttgggcacagcttaatacatcgttgctggactaatgcagcaaatgtccatatccctgcctcttctactttattcascaggaatctgttcctcttcttcaacagtcgatttcctattggtatacacaactatccagtcaactatccagtaggggaatgactcatgtgctccacgcatcaggccctcttgcttctcacgcctattgagatcctgtggatgggaaatgaaactgattgacagacccagaaaactaagcatagataggacccaaacactc

SEQ ID NO: 144 - DNA, 401 bp, Homo sapiens
gaaaggggcgagagtccacctgggtcctaccttgatctttagatgggaagtgggagagttgatggggggagggggagaaattgtgggctgggtccccactgggcagggcgggctgtgtggcgtgggagttaagaacctgggcaccagggttcagatctcttctctgccacctacctgctgtataaccatgagcagtcaacrgacttccctaaagcctcgacttcctcatctgtaaattaggggctaggtagtggcaggtgtttaagttctagagggaacttggatagtcagaattactctggagaagtccttaaggaacgcatgaggttgagtggccttggttctgtgggcacagcttcacccaccggagagggaggcctgtggggccagtgcaggatcca

SEQ ID NO: 145 - DNA, 401 bp, Homo sapiens
gccacagggctgtgagactgggtcttgaggcaggatgagataaagcccagcagggaacaaggagggaggaacacgttgggggcccagcctattttccagtctccaccttcacagcagaatggatcctgcactggccccacaggcctccctctccggtgggtgaagctgtgcccacagaaccaaggccactcaacctcatgsgttccttaaggacttctccagagtaattctgactatccaagttccctctagaacttaaacacctgccactacctagcccctaatttacagatgaggaagtcgaggctttagggaagtccgttgactgctcatggttatacagcaggtaggtggcagagaagagatctgaaccctggtgcccaggttcttaactcccacgc

SEQ ID NO: 146 - DNA, 401 bp, Homo sapiens
acaaggtgagtgggaagcaactggtagttaaaaaacagggagcctcccacagccacattggggagtcttttttttttttttttccagtggacagtggggctcttagcatgagaagggcatggtcaggtctgtgttttattgtattatttatttatttatgcacttaaaattataattttattttagaacagatactacacrtccctgtttaaaatgaaaaggaaccgaagaatgtacagagaatttccttcctactcatctttggtctcccagcagacaaccaagtcattagtttcttttgcattccctcagagatattttatgtgtgtcgaagcaaatacttatgcagtatgtgacacccacacacgtgcacacacatacacacacacgtataccttatc

SEQ ID NO: 147 - DNA, 401 bp, Homo sapiens
tggtctcccagcagacaaccaagtcattagtttcttttgcattccctcagagatattttatgtgtgtcgaagcaaatacttatgcagtatgtgacacccacacacgtgcacacacatacacacacacgtataccttatccccttttcaacacaaatcacactctgcacattgtgccttgcccttctcactcactccgcctyggatatcattccatagtggtagataaagagcttcttcattcttttaaatgggtgtatagtattctgtcatggcattatagcattatattcttattttcaacctgtcccctgctgatggacatttacctagtttccagcattagctgtaacaaacatgctgcttggctgggtcaaagattatgtgcctctgcagaggttat

SEQ ID NO: 148 - DNA, 401 bp, Homo sapiens
ctattaaaatgaagaataattacattttgagcttataagaatgcccatgaagcatttctcgggatcggattatggtcattggcaatgcagaggagactgctctgtgaatgactctgatgatgctgattctatcccactgctggggatagagggaaggcatggaggagggagggcctttcttttttcgggcactctgactaygcacactaggtcagcttacttaatctccagtaaacttatgtttcagatgaagaaacggagactcacagacatgggtctaggtcatgtgctctagatcacacagccaactagtatcgaagacactagaaatcagggctcctgacaccactgctgaagaattcttcccactgttccaagaggcctcttggtcacccctgtcc

SEQ ID NO: 149 - DNA, 401 bp, Homo sapiens
gaaggctggcatggtgaggaggacccaggaggcagcagagaggagaaggaggagaaggagaaggagcagcagaggctactgaactgtagtggttttaccagggagagaaggtgttgctctgagttgaggcagagcatggagggaggaggtggcttggggagatatctagcgggagaatccacagccctggtgaagcaattygcctggatcacagtaagtgtggaagaaagctggcagtgctacctagaagggcaggggtgcgggaggcacagggggactgtgagacagaaagccacctggttgctcaggcggccacaggaatgactaattctgatgtggtcaagaaaatgagaaaatgtccttgttgagcacagtgttgacagacctcattgttttatcaa

SEQ ID NO: 150 - DNA, 401 bp, Homo sapiens
atcctgtgtcatgaagatttttatccagtgtttttttctaagaattttgtagctttagctcttaagtttaggtctttgatcattttgagttaatttttgtatatgatgtaagttaagggttcaccttcattattttgcatgtggatatccagttttccaggcacttttgttgaaaagattgtcttttccccttttaacttygtaaaaaatcgattgaccatatatgtgtgggtttatttctaggctttctgttctattccattggtctatatgtctgtccttaggctagtgccacactgctttgatgtctgtagttttgtattaagtttcaaagtcagaaagtatgactcttctctctttgttctttttcaagattgttttggctatctggtgctccttgc

SEQ ID NO: 151 - DNA, 401 bp, Homo sapiens
tgtgcttgggcgactcactccatctctctgagctgctatttcttcctttgtaaaaggggagctgaaaagttcagtctcatagcgtttaatatgagggagcatttcacgtggagcctggcacaccatggatatgtaggaataatagctgtaacatgtggagaacctgctgtgtacttggcactgtactaggggtttcgcatrcatagttcgtggaatcagtcggatccttacagtttcctaagaggtaggttttgtgtctggcttgactattgagaaaagtgaggcttaataaatgttggctgttttgaatctactatcccaaaggtaaaatttatttatactctatttgtttatatatctttatatggattataaattcatatatatatgtatatacacac

SEQ ID NO: 152 - DNA, 401 bp, Homo sapiens
gtctggggtctaggagtacaaggggctccagccagagacggcagctgcacagctctgtagtgcgggcaggagctgaccaagagctcattcaaggactgctgtccctgccatcccactgtctcctccagacttccctggcagctacagtatgttgcggtgcttgctgggcctagacgtgctgactgtgtatgcaagctgacrttcgttagcacacaaaaaaagtttcagataaatatatatgtgtatgtgtgtgtatatacatatatatatgaatttataatccatataaagatatataaacaaatagagtataaataaattttacctttgggatagtagattcaaaacagccaacatttattaagcctcacttttctcaatagtcaagccagacacaaaac

SEQ ID NO: 153 - DNA, 401 bp, Homo sapiens
tattgagatggtatggacaccaccaagcttggtgcctggtacagagcaggtcgcagagaagtctgagttcttttcctgcctttcccattttctctcctgtgtttcttttcttcttttctgtctctcttcctcagtgttattttttccttttcctctttccttccctctcctcactgttccttcctttgtgaattatttttscctccctcgttccctctccaagctctcttttgtccttctgggtattgcctttctcaaggcaaagacctaagccccgctacttctgtgggggcagtgtgtcatgtctgagctactctagaactgattgacaggtgggtctgtggccctctttggaatctccttactgaactgaaatcatcgtgtcacactgacctttggag

SEQ ID NO: 154 - DNA, 401 bp, Homo sapiens
gttttgcagagggagtgcagagcgttgcctcatggatgtccttaaagtgaccagtggtgggagggcttctactctaccttttatttgtggaatgtggtggttttccatttagatagtggcatgaaattgcgttttaaaataaatatatttaagtaagaacattaattcttttaaggaaaataaatgagcaaatagcttagrtggcacacaaatttgacaaagcttgtgaagaggatgtgggacaattggtctatgtgcaggtcaaccctgagagaggaggaggaagggagggagcagagcgaccttgatgttttgtcatcccctctttgtgcccaggctggcactgggctcaatcttctgcttttgtgttttgaaagaccattgatgccatcttccaggtc

SEQ ID NO: 155 - DNA, 401 bp, Homo sapiens
tcttcctaccttagagggttgttaagaattcaataaatttatgtctgcaatttgaaagtgatagcaaactgtcatagtattgggtactataattatagctatcatatcgttttttcgttggtttgagaactaaaattacatatatttaatgtatgtaattaagggcaagggttttattaatctggctacaggacttaaatwtatgttccctgatccttgaagatcagctgctttccaaattctcatatggatttgagaagggacacatgcccctgcctccaacctaggctgatggaggattgttctcatgatagtctcaggtttaaagtaaactcagagttggctttaaatcacagccccaccactcattagcctgtggcctggaacaagctaccaaagct

SEQ ID NO: 156 - DNA, 401 bp, Homo sapiens
tatgttccctgatccttgaagatcagctgctttccaaattctcatatggatttgagaagggacacatgcccctgcctccaacctaggctgatggaggattgttctcatgatagtctcaggtttaaagtaaactcagagttggctttaaatcacagccccaccactcattagcctgtggcctggaacaagctaccaaagctrgccaaacttttaggaccctcttctatgaaatagggggaggaagaataatacccacctttcaggattgtgatgagaagatggggattggaaagcttctagcacaattgcttgtaccattggtgctcggtaaaaggtcctgtctctttctgccactcccactgtgttgcatgctagactatatacagagaagcacttagagc

SEQ ID NO: 157 - DNA, 401 bp, Homo sapiens
ccaattgtttgtatacccaatgtattttcaggagacatttctgtagcacttctagttctggagtttgtttccgccaggaagagccacccttaccttcctgacactgaggcttgctctaagtgcttctctgtatatagtctagcatgcaacacagtgggagtggcagaaagagacaggaccttttaccgagcaccaatggtrcaagcaattgtgctagaagctttccaatccccatcttctcatcacaatcctgaaaggtgggtattattcttcctccccctatttcatagaagagggtcctaaaagtttggctagctttggtagcttgttccaggccacaggctaatgagtggtggggctgtgatttaaagccaactctgagtttactttaaacctgagac

SEQ ID NO: 158 - DNA, 401 bp, Homo sapiens
atatatacacaacagaatattattctgttgtgacataaaaagacatgacataaaaagacatgaagcatcaatacatacttcagtgtggatgaaccacaaaaacactgtgctaggtgaaagaagtcagacacaaaaggttgcatattgtgcaattccatttatatgaaataccagaataggtaagtccataaaacagaaagkagattagtagttcccaggctggtggcgcacagagaatgaggagcaaagggcttaatgaatacaatttcctgttggggtaatgaaaatgttctggaattagatagtggtgatggctgtacaattctttccacattgaaagtatgaatttcatagtatgtgaattctatctcaattacagagaaaatagattgaaaggtatg

SEQ ID NO: 159 - DNA, 401 bp, Homo sapiens
ggctttgaaggagctcaaacccattctgcccctttcagtgcctggcatgctactggttttcaccatgattggttttcaggacagctgcagagttagcataggaagagggcaagttaaaacatcaaaagctcacttggttttactgagactcttcttgaataaacactccacagattgctcaagcctttggttaatttccasagttctgaacaagttgattctgatcatttttgccagtgttctttgtttccatggaagagggcttttcagatgtccttgctgtatcattttgctgatctattagtgagtattcactcttagatgtgtaccccacgaattcatcccacagccaaggcaaaaaaaaaaaaaaaacattcatgcccgctgacatgtttatcaca

SEQ ID NO: 160 - DNA, 401 bp, Homo sapiens
tctttaagaagacatacttattctgtgtggacatttatctttcccatttaaaaaaaggaacattgttagggcaaaaaaaaaaaaaaaaaaaagagggaaagagaaaataaataacccataatcccatcatttggtgtattttcttccaaccatggttttcccatgctttgccaagggattctttttttcagattttggttrtagtatgtatacgatttcatatcctgctaatttatttaccattatatcacaaagaactttctgttgaatgacagcaacaacaataacaacttacatggctgagccaagcctataatgtgaggtttaaatgaaagcatctacaacacatgatggagttgttgccatcttatagatgagaaaatgaggcttagggagtctaa

SEQ ID NO: 161 - DNA, 401 bp, Homo sapiens
gatgactgggctccctccctgactaccagcacaagttaggaagaacaacctgggcctcagccccacagcttccgaagataagcctcccatctttggtggaggtgcccaggatggaagctgcattgcccctgctgttgggctcatgtctttcacccctgcctcactggcccccagcccaggtggggtactggaggagctgakacagtctgaaggactggaatggatgtcacggtcccagggttccagatgggtgggagctgctttgtctgagtgtaggtatgacaagagaaaggagaaagtgaggcacagcaaggtgtgacgagctctgcagagtttatggctggagggtgaatcatgggcttcagtgaaccttaggagtcctagtttgggtctaccttttt

SEQ ID NO: 162 - DNA, 401 bp, Homo sapiens
aactcagctcagaggtccatgccctggcaaggtggacaggagatcaaaaccacctaactccctgactgcattccaagcttctgccatgctctcagctctttccgctcagtctgaaggaaagggcacctggagaagcctcgtctgtcttctcccgtgggactgctacaatggtctgtcctgccaggccctccatgctgcagsagagtagccactaaaggacaccctgtcgcattgctccctggcctcatgcatttccccagcctcctgatgccttcagaatttaaaactcctcatcatctagcccctaggtaccttttaggcctcatcttccgccactccctgacgtatgccagaagccagccgccagcaggcctagagttttaccagctggctgagcctcg

SEQ ID NO: 163 - DNA, 401 bp, Homo sapiens
gggagtggcggaagatgaggcctaaaaggtacctaggggctagatgatgaggagttttaaattctgaaggcatcaggaggctggggaaatgcatgaggccagggagcaatgcgacagggtgtcctttagtggctactctcctgcagcatggagggcctggcaggacagaccattgtagcagtcccacgggagaagacagaygaggcttctccaggtgccctttccttcagactgagcggaaagagctgagagcatggcagaagcttggaatgcagtcagggagttaggtggttttgatctcctgtccaccttgccagggcatggacctctgagctgagttcaccttggcagccttgatgaactgctggtcagccacattctctgccttcctctgccctgcc

SEQ ID NO: 164 - DNA, 401 bp, Homo sapiens
cagacaaagggacagtccccctcccttgctgccagcgaggaggccagaagggaagacaaggtaagactgaccttgagggcagggatctccacactgtcaccgaggctgatggagcctgaaaggatggtccctgtcatcacagtgccttggcctttgatggagaaacagtggtccacagacatgaggaacggtcccgagggrtctctcgttgggatggaaatctgggacgtcaggagctagaaaagagaaactggtgccacagtccgtggggagaggagccagatggggcagggcagaggaaggcagagaatgtggctgaccagcagttcatcaaggctgccaaggtgaactcagctcagaggtccatgccctggcaaggtggacaggagatcaaaaccacc

SEQ ID NO: 165 - DNA, 401 bp, Homo sapiens
gtccagaaagggaggtttcccctccagcagccccacttgttaaccatgtgatctcaagcccacctcaccttctggagcctcagtttctttatctacacagaagacctacttgggaacacctccttgaggcacatcataggcctccaataaacaggcgctatgagaattagggagagcagcagtcctagaatctgagttgamagacttggagccgggcggggccaggcagccagaggggaggtggggcggagcaggcagtgggagtcccagggcaggcacagcagcaggctcagcagctgaacagacaaagggacagtccccctcccttgctgccagcgaggaggccagaagggaagacaaggtaagactgaccttgagggcagggatctccacactgtcac

SEQ ID NO: 166 - DNA, 401 bp, Homo sapiens
ccctataatgtaggtgggcttcatccaatcagttgaaggccttaagaacaaaaggattaacctcctcagagaagaggggattctgccagcaaatggccttcaagctgcagctcctccctaggcctcaatcctgccagcctaccctgtagattttggacttgccaggttttataatagtataagcaaattccttaaaaaacrtatctatttatctatctgcatctaatactaggtgcattagttggtgttctccagcaaaacaaaactaataggagatacagatatctacatatttacatctatgtatctttacctatgtatctatagatacctagatatctgtatctcccattggttctgtttctccggagaaccttaaccaacacacctagtgagccaga

SEQ ID NO: 167 - DNA, 401 bp, Homo sapiens
cattttctgttctagcaaagaatctgcaaacagtcaccaaagtaatcttaattttgttaaatataaactgaatctacttttacacttttgtgctttatttttgaagatttgcacttttagtccctggcttaaactagattttattcaagtggtctttttctgggaccaatggtcttcagaggaggacatgacagcaggtaraggaggggactgtgactcacagtgtctgggggacatcctaacacccagctctggccaggttccagggctccttggatatggtggggccctgccattcgactcctcccactagatccaaggagctctggaacctggccagagccaagtcctttcttttgttttgtcctttctggtcaggagactcttccctaatacccctg

SEQ ID NO: 168 - DNA, 401 bp, Homo sapiens
tctccgcataactttgctatagaagtccatctctatttctggttgctgctaagttgcttggatctgtgagtcacacacctcctctcttcaacagaaggttgtccaggctcacctttggccttctctccaaggtatgctttctcagcagtgaatttcctaatcttaacatcctttgcaatctagagggactgagaacctccsaaatcatcaagcgctgatttctgtttgctaacagttccttcctcaattcattccttttccctcatgttttactataagcatcaatggagaaacaaggcagcatctttcacagtttgcttagaaatctccttaaccaaatgtctcagtacattgcttacaagttctgcttttcctgactagtaaattagatcatcaggcag

SEQ ID NO: 169 - DNA, 401 bp, Homo sapiens
tgtttcttgtctgtagaatcccagaagtctgacagctttttattcatttgtcaagtctctctccctttcagtccagtgttcttgctggtataacattctcaaaacccttgagggtctcttatatacatcaaggggtccatgccattagccaagacggctctccgcataactttgctatagaagtccatctctatttctggytgctgctaagttgcttggatctgtgagtcacacacctcctctcttcaacagaaggttgtccaggctcacctttggccttctctccaaggtatgctttctcagcagtgaatttcctaatcttaacatcctttgcaatctagagggactgagaacctccgaaatcatcaagcgctgatttctgtttgctaacagttccttcc

SEQ ID NO: 170 - DNA, 401 bp, Homo sapiens
acatgatgacattaggaactttttgagctgatgataatttagatgagattttggacttagagttaatggcctaatggactgagagtttgggggatgtttgaagaggtgaatgtattttgcatgtgggatggatgtaaattttgggtaccagagggtagactatagtaggttaaattatggtcccccaaaatatgtctaccrgaacctcagaatatgaccattttggaataagggtcttgcagatgtaattaaggtaaggatcttaagaagaaatcatcctggattagggtgggccttaggtccaatgaccagtgtccttataagagacagacaaggagaagacacggagagtcacagagagaagtccatataaagactaaggcagagattggagctctgtt

SEQ ID NO: 171 - DNA, 401 bp, Homo sapiens
tcgatttggacttctggctccagaactgtgagagaagaaatattttgttgttttaagatatcaaatttgtggtaatttgttatggcagccctaagaaacttatgaattttgcatggaaaggactgaaatcagaaaaagccttaagttctttctgatcctgtcaggtcccttaactctgagctttggcttcctcgcagggartcgctgcccctgctcaccatcttgggcttctgggggcaacatgtcagaaccattgcatactgatggccagcactgcccgttcctttctttcctggcatgcccatcccacaagtgagagaacctagacccgggaaacttaagcaactggacagcagagctgggacttgaagtcattcatccagctccaaagacccagccct

SEQ ID NO: 172 - DNA, 401 bp, Homo sapiens
accactaccagcccaggcatctcctctggggctcccgtgacagcagggcacatggccagggctgggtctttggagctggatgaatgacttcaagtcccagctctgctgtccagttgcttaagtttcccgggtctaggttctctcacttgtgggatgggcatgccaggaaagaaaggaacgggcagtgctggccatcagtakgcaatggttctgacatgttgcccccagaagcccaagatggtgagcaggggcagcgactccctgcgaggaagccaaagctcagagttaagggacctgacaggatcagaaagaacttaaggctttttctgatttcagtcctttccatgcaaaattcataagtttcttagggctgccataacaaattaccacaaatttgatat

SEQ ID NO: 173 - DNA, 401 bp, Homo sapiens
ttggaatggctgtgccctgcctccaagggagttcaagcggtcagatgtgtccaagtctattagtgaaatctgacagggatgtcactgtgtttggaaagagggccatggccccccatgtcccggtgcccaataggcactggccaccaatcatggctggaagagggcaggggtgagaggaggtcaggagttctgaacctcagsctctgctgcaatgggctctcgtacatgccgcagcccaggcaaggcctcagcaaagcacagcagcatggccacagaactgccatggggcctgcaggccctgccctggagtagaggcaccactaccagcccaggcatctcctctggggctcccgtgacagcagggcacatggccagggctgggtctttggagctggatgaat

SEQ ID NO: 174 - DNA, 401 bp, Homo sapiens
ccctgacacttactacttccggaacccacaacaaaaattctacatgagaataatatcaaatggcaacaataaacatgacaagagtatcagctaaagcttgtatctcctagatgccaggaaccttatatacattatccctagtccacaccacaccaccctgacccatcttccagaggtcctggacagagccaagcacacagkggtcatcccaagtttgagctgaaccagtgaaacacgaagaggttgactgacttgcctgtggacacagagctggtacatgcctgccttgagtccctctgcactcccagcccctgctctctttccccatggtctgtggcttcaacagtttctgatgttacaaccctgatagccaatcatcaccagaaacatcactagcctga

SEQ ID NO: 175 - DNA, 401 bp, Homo sapiens
gtaaggtggccgttcagcccctgagtccaggcgtcacatccttcctcccttcaatgtccagtgaaggagaaaagctgtcttttcctgttgagttccaaaaagcagaaaagcttttccccaaacccctaggacatgtcccttcacatatcattggccagagtcaggtaacaagccgctgccaggggaggggtgttccactgycaggacggatccttcgatagcgtgatgttcaggagtcaaccacaagtagcactgcatcttggatttgaaggagaaaatggaaagccagagctgtggggattatgccagggaaggtgccacctgagtgtgtggcccacacacgacagggcagagccagttctggagccagccagcactcctgatgacatccagacgtctcc

SEQ ID NO: 176 - DNA, 401 bp, Homo sapiens
aactggctctgccctgtcgtgtgtgggccacacactcaggtggcaccttccctggcataatccccacagctctggctttccattttctccttcaaatccaagatgcagtgctacttgtggttgactcctgaacatcacgctatcgaaggatccgtcctgacagtggaacacccctcccctggcagcggcttgttacctgamtctggccaatgatatgtgaagggacatgtcctaggggtttggggaaaagcttttctgctttttggaactcaacaggaaaagacagcttttctccttcactggacattgaagggaggaaggatgtgacgcctggactcaggggctgaacggccaccttactcccaggctggaggtttgcagaggctgggaggcaggagagt

SEQ ID NO: 177 - DNA, 401 bp, Homo sapiens
cagaggctgggaggcaggagagttgcccagaagcagagcctgcacctgagggctgctgtgtgtctgccccgcctcagaacttcgtgtattgtgagagctctgtctccacacggttccagtcagggctatctgttacttttggaccaaagtatcatttatgatatgagagcaaaatggcatctctttcctagctgttaggarcacaattaaggaacaggctgctcctggcctggttggacgggagctcatccctgtggatgagtacagtgctctaattgggctggctgggttacatgtccacccctggagctggaagggacaaggtgggagggatggttcactaagaaatttgggttactcctaggaaatgcagaatagacatcaggcaggcaaaactgaga

SEQ ID NO: 178 - DNA, 401 bp, Homo sapiens
ataaagacagtgaggcttacgtcaagccctgctgcaagcacgctacgtggctcttgtcaaatcctcatgacaacctctggaggaagccaggggaggtaactgccccgtgagtgatggggcaggactcaaacatagtccatctgtgtccagcacctgagctgtgatggtgtggacactgggaagcaccaagccagtggatayctctcagttttgcctgcctgatgtctattctgcatttcctaggagtaacccaaatttcttagtgaaccatccctcccaccttgtcccttccagctccaggggtggacatgtaacccagccagcccaattagagcactgtactcatccacagggatgagctcccgtccaaccaggccaggagcagcctgttccttaattgt

SEQ ID NO: 179 - DNA, 401 bp, Homo sapiens
ggcttggtgcttcccagtgtccacaccatcacagctcaggtgctggacacagatggactatgtttgagtcctgccccatcactcacggggcagttacctcccctggcttcctccagaggttgtcatgaggatttgacaagagccacgtagcgtgcttgcagcagggcttgacgtaagcctcactgtctttatcaccacccygtacaactctgcatcttgtcttttctttaatgggcctttttacttggcccatggagtgcagagacttggggtggggtggtctgagctctgcatttcctgcctgcacccaggaccccaagagcctctgtgaggtcttgcctttctcctggcttgaggatttgaatcacacctgcagccaagttgtaatatcctgttgtctc

SEQ ID NO: 180 - DNA, 401 bp, Homo sapiens
aagggcatgccattcacttggggtttgggggttaagaacaagctccaagcttccacaggaaaaaggcctgcaggggcagcatcctccaacctgccagagctttaggacactgagcattgatctctgacaacagcacctgcagagagaagtcttcctgagttccctgcctcctgtgaggtcaaccttccatctttgcctggmgactgtccttcctcagctgtgcctccttagggagacaacaggatattacaacttggctgcaggtgtgattcaaatcctcaagccaggagaaaggcaagacctcacagaggctcttggggtcctgggtgcaggcaggaaatgcagagctcagaccaccccaccccaagtctctgcactccatgggccaagtaaaaaggccc

SEQ ID NO: 181 - DNA, 401 bp, Homo sapiens
agcagtggggcagcaccactcctgcctgtccccttccttaggaagacaccacttgggttaaagccaccatttctcccctgctccaaccatgcctgggccacccagtgccatccttgcagaagactgtgtgaaatgcttaggcctatcaggagcgcagacagacccactgtcacaggtccaggccgctctcagcacaagaasctggctgtaccctctgcctggacagctgactgcaggtcaggactccagccagtcatccgcttctggaagcacatgctggtagcagttcgtctagctgcaacagattctcaggggcctgatggaaaagggcatgccattcacttggggtttgggggttaagaacaagctccaagcttccacaggaaaaaggcctgcagggg

SEQ ID NO: 182 - DNA, 401 bp, Homo sapiens
gtggggttgaccatgctgccttcctccgagtcgcagcaaagaggaggaggaaaggggcaagctgctctagagcacgcacgcatgtgggcgcagtcaccacaggaagcctcagcccctgcaccctctacatggagccctggcagtcaggcagcactcagtggttgctgggggagcagatgtggaggtgccaaatgtggcgcrggtagggagtgtggctggcctctggacatcccctgtagaagccacatgttgagggagcctaggtcggtgtgggccctggcccagggtggccttgggacactcccagggcagctgtagcaccctacaagttgtcgtatgaaaaccactctaacttatacgtgcttttgggtggaattaaatgagttttattgtttctagga

SEQ ID NO: 183 - DNA, 401 bp, Homo sapiens
tctgcatctgacaattccactggcctgagtcacagtttccccttgaaacttaactgaccactgaaggtaaacaagattgtgaaagcaaatggcccttgggaagaaccattcccacctgaaggctgttcttacttatttaagaaggtggcctggccatacagaggggcgtgtcttgccccagtcacacagctggccgtttaygcctgggacccaagactctgtgttcctgcagggcacagtggatgggaaccagccctggcattccataaatgttgtttctaatcaaatccctatcttgtcctagaaacaataaaactcatttaattccacccaaaagcacgtataagttagagtggttttcatacgacaacttgtagggtgctacagctgccctgggagtg

SEQ ID NO: 184 - DNA, 401 bp, Homo sapiens
cttgggctctgatacctgtcagggactccagtccccgacatgacacgcatcaacagtatctggaaaggttgtgggcagggctggcttcatgggtgtgcaagctgaggtcacacagccctgcatggccacactttcatctgaatcagagcttgcttccaacctagaaaggcagtggtcttcagacagtcaaagatcagataytcctttgtggaccaggcagcacccatgcttgcattgggcacaacctggcactgtcaattgccatttacacagcattttctgcaccaaggccactcccagctggggctctgacactggctgggcacccatttcccaggagaggaaaccgctttgggccccagtatcgaggtcctgccagtcctcaggtcactgctagaccc

SEQ ID NO: 185 - DNA, 401 bp, Homo sapiens
ctctcttgcctgattccagggtgcagctgtgcttccccatcacaaggcgtggcctacaggacccgactccagctggaacatcttctagactcggccttccaaacatcctccctactgccctttcagagatgaccacaaccacctacgaaccaccccacttctcagactctctgcaaggagctccatgtttacctcagtcaygccagacactctctcgcctctgggctttagcacatactgttccttctgctcagaatgcctgggcaaagccctctgccttctctgagactcagcttcagtcgccttgcctgggaagcagggttggagcccttccagtgcccccaccacactctggaagccatgttcactcagtgccttccccatatgaagaaacagctgcc

SEQ ID NO: 186 - DNA, 401 bp, Homo sapiens
gtgacaggccaggtggaggagccgttggtgagagagaatccagaacaatctggaggggagagtgaacagagccaggagtatggcttgggcttcactaagttggggacgtttggggaacccacttggaaaggtctaggaagcaagctgacataagtgtctgaagctcagagaagtttgggataggacatatatttatgtgcwgttggtggctccaaccttggtagttggggcctctggctagaaaagaaaagttaaaaagcaagcttcagctgtttcatctaaagttataattccgatgctttaaaggctcccaaccctcttcttgttcatggtgggggagccttcctagttgtgaaagggtctgagtggctccagctttggcatattagggtgcaggggag

SEQ ID NO: 187 - DNA, 401 bp, Homo sapiens
tagtgaaggagaagggggtgagggttggtgcccagagcttccccaataaagtagaggctgccgcttgctgtgcgagccccagcttgagggcccagagggaagaccgtacagaggcaaggagggcactgccatgtggagggcaaatgccaactggtgccagggagctcctggagggctcagggaggacagggaagcccagtrgtggcatccatgcacaggggccaggaggaggggcccattccagctttctgaaaaggaggtggccctcagcagaacagtgccaggccagacccctgggctccctacacagaggcctccccagcagagaacggactttccaggccaaagccgagtgagggcacaagggaggtgagagagaacagggaaggacagaacaaaag

SEQ ID NO: 188 - DNA, 401 bp, Homo sapiens
tgaggggctttttgatgtgcaccatggatgtttggcttgaccaaatttgtttgcttaagcattgctcttgccagttcattcggaccttctctttcttttaaaaatatgctgcttgccaaaggttattttggatctgtttttgtttatcaggtagaattgttccagcgcaattgaaagcagacccacatgttgacacgcacyggagctgcttgccaggacacgtgcacatgtgcacacgcgcacatgcagaatatgtggcaggcatctcatcgtgagccctagagtgtacacagcttaggaagggggactggggaagctgcccatttcaccggggacttggtatgtgaagattttcatcatctaggtgccagcactgacagacttcaggtggggaaaatcta

SEQ ID NO: 189 - DNA, 401 bp, Homo sapiens
aggtagaattgttccagcgcaattgaaagcagacccacatgttgacacgcactggagctgcttgccaggacacgtgcacatgtgcacacgcgcacatgcagaatatgtggcaggcatctcatcgtgagccctagagtgtacacagcttaggaagggggactggggaagctgcccatttcaccggggacttggtatgtgaasattttcatcatctaggtgccagcactgacagacttcaggtggggaaaatctagggactgttacctcctgggagaggcaacctggtgagtctgagtaccttggggttaggctggctctgccgctggttgcctgtcatccttccctgctctggcctggcttccttctctgtgactgatctcccgacttcacaggctttgtgc

SEQ ID NO: 190 - DNA, 401 bp, Homo sapiens
ggtagaggggagtgaggagggccagggctggagcactgccgtgtcccctcctcctcaccacctgtagcatgtccacttcctctgtccagcctgcaggatcctctgtgtttgggtctaccctcttgtgcttccctactgatccccaatctgtagttgttttcaaaaatttagccatggtttcctccctcgcacagccatcayggacaccaacccagctcccctcgcccacgctcccttagcccattcctgtccagcgtcaggccagtcccacgttcctggagccgccagcaccctgccactccctgccccttcacagccatccccatgtctacgctgcattcttgtgctttacctgtgctgtgtgtgcttcaccttaggcgtttaaccatcattctttaaaa

SEQ ID NO: 191 - DNA, 401 bp, Homo sapiens
cctgcctttctttaccagtgatctgcaaatcagggtctgttgagtggggttttccttgttgtgacttgtctctgggaccccaagatagggccaggcccagagcaggagtcaggaatcccttgttgaacaaatgtgcaccctgggccctgagatttggggctcactgtggccattgacttcagggagttctcctaggatacrgcaagctgccagtacattggttggagtagaggacctatactttatactttgcaggtgaacatgttgacttaaccatcagaagtctccagatggaaatgtcttgccccatcactgtagtttaagtggtattcctttaagaagaataacttggatgccagaaccaaaggcctgtgctattggactgggccagtgaagacagc

SEQ ID NO: 192 - DNA, 401 bp, Homo sapiens
accaccactcagctctgtggaacttctccccagtggcctaaatgctgattcctgggacagttccaaatataggttccccactcccgctttataggaaccagtttaccaagacctggaggccaccactatgtctcatgcctttctttctgcatcctgcacattctcagtaccttccagactcttgccaagatgcaggctctrgagccatatcacaaattcaggtgccttttagggcctggcaggaggcagatggagggaagcagcacatgggaagaactgtacttctttacactgtgtgagtagacctgggcacactgaagacccaccactcatctcaactgtgcatgggaatgcaaaactggaatacctagattttgtcatttttaaggagaagctggaaa

SEQ ID NO: 193 - DNA, 401 bp, Homo sapiens
cttttttttttttttaagtattggaatttggttggcattgcatggaatctgtagatcacaactgggaacaattgatatcagtattgagtatttcaatccatgaacatggtatatcttcctattgatataggtctttagtttttctcagtaatgttttatcgttttttggggttgttttgtttgtttgtttgttttttgacrgagttgcactctgttgcccaggctggagtgcaatggtgcaacctcggctcactgcaacctgtacctcccaggtttaagcaattctcttgcctcagcctcccaagaagcgggattacaggtgcccaccaccatacctggcttttttttatttttatttttagtagagatggggtttcgccatattggccatggctggtctc

SEQ ID NO: 194 - DNA, 401 bp, Homo sapiens
gggaccctatgggaaggagggatatctgggcctcaccaggtatctggtctaaggcaccccagtgaggacccctaatggctcccaaccacaatacccctgcaagagcaccagcatgccagtctacagaagtgctggctctgagctggctctctcctctggatctctgaggggccaagggcacagcagaaggtagggagcagmcttctcaccaagaatagaacaagtgcctctgactaccgtccaaaggggagaagcagccacctttgtgtgtgagcttccctaacttctttgagtactgctaccactaaaaatatttaccatttacaaagccaagaactgtgaaaggcattttgtaaaatttcatttaattctcccaacaactccacagggaagatactccc

SEQ ID NO: 195 - DNA, 401 bp, Homo sapiens
gacatagccattttcccaggcatcatggggacagccctccctgacaggcacagcagaggcctggaggtacatgcaagagattgatagttcatcaaaatggcagcaacacacattggaggtatgatgtgtttctgtttttgtttcatgacaattctaattcgaacaaaaatgtcaaatatcagaacagtctgccattccaaytgtctggaatggcatcttccaatccttgcatatgctgtttcctctgatgggaataccctccccttaccttttccacttagtaaacctatttctttcttctcagagccctccatgtctccaagaaagccaaccagaccctcccttggggtccctccctatctcaagtgcccccagtgtacaggtgctctacttccttggct

SEQ ID NO: 196 - DNA, 401 bp, Homo sapiens
tggaataccctaaaagctcttctcttggaaaacgtaatccacgtaggatcttgaaatatgaccagcaggatggggcttcctgtccctggtatgcagaaagggtgagtggaggcaggaggaaggatggtgtctgagctggccaccccatgtagctaacacagtccaatgccactctgtcctcatcctggccacccataagcytttcttgtctcctctttcccttcctaccaagtccagcatttgcaagccatcctgatgctggcccttgcttttctctgtagcctcagcttttctcattcttctactgataaagcaaactgtagttctcctgttttctcagcatactcaccttcatggccatgcacagacctgcagggcctgtgtctcctcgtcatccgcac

SEQ ID NO: 197 - DNA, 401 bp, Homo sapiens
tcatcagattatttatgtgtttttgtttgtttgtttgttttttgctattaagttgagttccttatacagtctggttattaatcccttgtcagatggatagcctgcaaatattttctagtcaccactgttttctggcttgtagcatgtgctcaggaactacttgttgagtgctctgtgaagacaaaaatattttgatgtccrtgaccacctgacacatggggaaggcctggaggaaggcatgggaaacccagagcacagacctgggttcaggtccaggccaacagctgactcccttgtgtgttcttggtcctgttcagctctatgagctttacttccctcagccctaacatgaggattataagtaatacctgctcctcagagatgaccacgtatttcataaa

SEQ ID NO: 198 - DNA, 401 bp, Homo sapiens
ccttttccctagtggcaactttgtttctctcctggagctgtggagttactcttgacagactggaggggagaagtcctgaggggtgagcctgggaatggggcaggaggaaagagactggtgtgcagaagggacttacacatgtcgcaacatttaatgaggaggggtagagcagcagttcctgggagaaagaactcccatggsgggcaggaaatgaggctcagtggaagaccccactgggaagctggcaggcagaccagtgtggtcaggccatgcagaagggacctggggggctactcaaagttacctaatggagtgaagatgaatttttctcattgaagtggaaaaactgctgatttttatcagggcaagttggttagagtgttagttaaaccatctgtcaa

SEQ ID NO: 199 - DNA, 401 bp, Homo sapiens
taatgccctgatttccagcttaggtttcatatgccagtcataaagtgtaagaaataaatatcctaaaacaattatttttttaaaaaagtttggcttataagcaaaatatctaaaaacatttctaatttttatacagaagaggaaaaaataatcagataatcattgattttgttttttgtttttttttgggggaggtaagtyatatatatggttgggaaattctaacagcacgaaagttacaaaatgaagagtaggagcctctcctcctctatcccaaacccattctttataaccattattaacaatttttctgaattttcccagaaacaattttatgcatatactcacgtatataagtgtataaagctattttaaaaattatactcacaagaaatggttgt

SEQ ID NO: 200 - DNA, 401 bp, Homo sapiens
gttacattcctacaacagtatgtgagatggcccacgtccccagacttcttcccaaattaaggatcatcagtcatttcaatttttacctgacctgataggtgaaacaaggtagtatttccttgctactccatttgcatttaatttttgaatgaggttatctttgcatatgtttattgtccatttgcatttcattgtctatarattacctgtttatggtctttgcccatttttatactaggctgtttctttcttattaattaatataaattctgtgagtgaggaaatgagctctgtgtcagttgtgtggtaaataactactgtaccttctctcattaaacttttgacttggttttttttatccatttagaagttttacatacttacagagactaatttgtcat

SEQ ID NO: 201 - DNA, 401 bp, Homo sapiens
gacctccaaaagtgctggaattgcaggcatgagccaccatgccagcctgttgtttgtaattttaatgagaatgtggtgagtgttttatcattaagtaaggtgatggcttttcgatctcatttatcttttctctcatcataaggaaatactcatttatttttatttttttaaatcaaggattatttttaattttggaaaaaycttcatggcgtattttggagtgatttatggtttttgtcttttgaccttttactatgctgttatattaatatgttttctagtattgcattctggaaggtatcctacttagttgtattctggtctttcaataatatttatattattctttcagtaatatttatgtcataattgaaatgtctggttggcaatttttgtcatgt

SEQ ID NO: 202 - DNA, 401 bp, Homo sapiens
acagtgaggatatgaatagtaaatatttatatatcaaaaggcagagcaacaaaatttgtaaagcacaaattgtaggcaatgcaaaaacaaacaatttataaaataagtgattagtttgaactaagacctatattataaggtggggggtttatctcaaactttatattcttataacagaataactcttctttttaaaagccrttggatcatttacaaaatcatatattaggccacaaggaaaactcaataaactccaaacagctgacatgacacagaccatattctcccttcacagtgcaataaaaactttaaatgcatgacaaaacaaagaggggaaaaaaaccaaacaacttggaaatgagacgattttctcattaaataactcgagttaaagaaggatg

SEQ ID NO: 203 - DNA, 401 bp, Homo sapiens
ttggccgtagctctgctcttattatatgatgcccagtggcccaggttcctgaccactcagactggaagagccaagtcatcctggcaggggccaaggctctgacctcagtccttcttggtgccagcttagtgtgtgtgccaggctggattggatgtgtcaggggagggggaattgggagaagacatagctttccttgagtayctactgtgtgccacgtgctgagctaggctctccaagtactaatttctgatcctctcaggaatcttccaaagctgggactcttatcccctctttgcagctggaaaaactgaagccaaatgccatttaatcgcacagctattgagtgagaaccagtaagccagtcccccaaaacctaagctttacccctcatgccaatagct

SEQ ID NO: 204 - DNA, 401 bp, Homo sapiens
aaatagacacacttggagaaggaaatcaaaaagcaaaacaaaggagcagttgcttttccaatcacatacaccttgtgcagcttaatgaagtcataacagaaccaaaggcaggtgcggtatctgtgcttttcagggagaaaagcaggtgtcaccattatcatctggatgccctttggccacagcatttttagaccatctgargcactgccaagaatattcctgtggcttagtgatgagccttttggcaaggttaggaaattagaactcaccttagttgtgtatttaattaagggtagggagaaagtcacaggatttcctttttctctcctttccctctggaagcaaggggccacatacaaccatctccgcatctttcagctttgactgctcctgccccgtaa

SEQ ID NO: 205 - DNA, 401 bp, Homo sapiens
ctgaggcactgccaagaatattcctgtggcttagtgatgagccttttggcaaggttaggaaattagaactcaccttagttgtgtatttaattaagggtagggagaaagtcacaggatttcctttttctctcctttccctctggaagcaaggggccacatacaaccatctccgcatctttcagctttgactgctcctgcccygtaatcttgactcctggaggttgtggcttttactcactctcttagtttggcttcttgagagtttctaaaattgtacaaggtcatagccaagagattgcctcttagcaacctcgtgccagtggccttgcgcctatcccctggtctcccacacttacaggaggcccacagagagagtcatgctgctgttttctttgtaggca

SEQ ID NO: 206 - DNA, 401 bp, Homo sapiens
agatacaaagccaagcattttacatgccttttcttctgatttaaccctagacaaccctgtgaagtagggactgttatcatctctctctgagatgagagaaccagagctcctgagttacacagaagtgggcagtgctgggtctcagacaggcagggtccccgctgctgccccaagcacctggacctaggccagctctctctyctggagttttggtcctgtccaactgctggctacttccatgcgcagaggatggagtagcgggatcccaccgcctttgtgtcaccagactgcgctggaataggggagcctttgtttggtgtgggcacccaccggggttcagaataccagtgtttagaagaggctccgccttcaccctccaaggaaggacagaggcgtccatg

SEQ ID NO: 207 - DNA, 401 bp, Homo sapiens
cagccagccaggtctggcaggtaggcctcccactcccagagtctatggatgccacacccaggactcaggcatgaggaggtccactttgggaacctgacttcaccgctgcctggtaacggggctttggcaagtcaggctcttggcatctccatttttaacagggcacttgtaaccaggacatcctcatgagcacagcagagractgttcccgggctctcatgagatgtgtgagaaggcccctcatgtggacatatatgaatgtagcacatttttgttagtttactttgaaaaggtaatactggcagatggttaaaaaggcaaaagatgccaaggttatgcagtgattagagttaagtctccctgacaaccccctgtcttgggtccctggtctctccctccta

SEQ ID NO: 208 - DNA, 401 bp, Homo sapiens
gagttaagtctccctgacaaccccctgtcttgggtccctggtctctccctcctaggcagccactgctgctgccattctggtgataacctctgcatgtggaagcttatgtatctccccctgtttcttacaccaggccctacccagtgtgctaccccttgcttttatctcctccactctagatgcaagatggttctacatctrtacatgtggatgtctgtttagcctctgcctaggaatctaccgtaaggacatgctgctctctctctccctctcattgaggcatagagtagttgtttggagagcacgttaaccaactgttggtaagaacagctgtgtgtatcctgtctgctttgaggtttcagtggctcaatgtccttgagagcagtttttagggagttatc

SEQ ID NO: 209 - DNA, 401 bp, Homo sapiens
tatgtatctccccctgtttcttacaccaggccctacccagtgtgctaccccttgcttttatctcctccactctagatgcaagatggttctacatctgtacatgtggatgtctgtttagcctctgcctaggaatctaccgtaaggacatgctgctctctctctccctctcattgaggcatagagtagttgtttggagagcaygttaaccaactgttggtaagaacagctgtgtgtatcctgtctgctttgaggtttcagtggctcaatgtccttgagagcagtttttagggagttatccagaaaatgtttagcaaataaggaactctttcttttttctctctggtgcaggatttctgaagctcaacattgttgacattttattttattattttatttatatt

SEQ ID NO: 210 - DNA, 401 bp, Homo sapiens
ttatctcctccactctagatgcaagatggttctacatctgtacatgtggatgtctgtttagcctctgcctaggaatctaccgtaaggacatgctgctctctctctccctctcattgaggcatagagtagttgtttggagagcacgttaaccaactgttggtaagaacagctgtgtgtatcctgtctgctttgaggtttcartggctcaatgtccttgagagcagtttttagggagttatccagaaaatgtttagcaaataaggaactctttcttttttctctctggtgcaggatttctgaagctcaacattgttgacattttattttattattttatttatatttattttattttttgagacagagtcttactccatcacccaggctggagtgccatggtg

SEQ ID NO: 211 - DNA, 401 bp, Homo sapiens
gatgtattgagcagagcctgtgcccgagggccatgctgaggctgctatggcctctgccagaagccagggcctgagctcctggggaggcccaggagggagggagggagtctaccattggtaccttgtgttgtagccaattagttatttgtcagaagccatccttgggcttgaagtccctgcacactgtcagtggtatggagkgtaaagctccatttcttgaaaactgcatactcgtcagggccagtggtgtcaccttggcagggtttataaggaaagaaattggccataattctagtgataacttttatatgaatttcctttatttcaccttcctatgctatatgttatacatttgtatagtggagatcactatgtttaattgttactaaatataatgtcac

SEQ ID NO: 212 - DNA, 401 bp, Homo sapiens
gccggctgctgaccagttgggccctctgcaggcctcagggcctttgcccccttcagccttctgctccagctgctccgtccatccacaggcctggcacagatgtcccctcctctctgaggtttcctcccagttccctgccaggtggtaaccatggttcctttctcagggctcccccaccctccttgccacactggggcagcycttgccatgtgggccatgggaactggttgttaggtgactgtgcactccaggcagaggcaggatggagttgtgcctggtcccctgtttctctagacatggcatagtacagggcatacaacaggctctgtggacaggagcccatctggcacagtggggagagccaggccgtcagcctgccctggcccagcacttgctggtgg

SEQ ID NO: 213 - DNA, 401 bp, Homo sapiens; identical to SEQ ID NO: 1

SEQ ID NO: 214 - DNA, 401 bp, Homo sapiens
aaccaggggtttccatgcactcctctctctgccttacaagctgtgggcactattcttacgtccaggtcacagaggaggagacgatctgaatgccacaccatgttctgtttatgtggctgtccctgcactgtgctgccatcctctcgactgcagggatggtgtctcattctgtcctgtgtgcccagaacataataggtgctmaggaaatggctgccaagggagtagcccctcttgcaggcctgctctgcagacacgctcagttctgccgctggcccctggcgtgtgtacagcacctgctgctggcagcacaggtttggccctgctgattggctgggtgtctggcttcaataggggcaggtcagtgttcctgttcataggacactgtttacagtgtcctgcct

SEQ ID NO: 215 - DNA, 401 bp, Homo sapiens
gactgcagggatggtgtctcattctgtcctgtgtgcccagaacataataggtgctcaggaaatggctgccaagggagtagcccctcttgcaggcctgctctgcagacacgctcagttctgccgctggcccctggcgtgtgtacagcacctgctgctggcagcacaggtttggccctgctgattggctgggtgtctggcttyaataggggcaggtcagtgttcctgttcataggacactgtttacagtgtcctgcctcggtgcacagcaggagtcagcgcactgcagcctgccacctgttttgataaataaagcactgcaatggcagagtcaagtagttgcaacagaggttgtgtggcctccaaagcctaaactgcttactgtcaccttctccaggagagct

SEQ ID NO: 216 - DNA, 401 bp, Homo sapiens
tcatgccccactccgtcactgctggactagtggcctctggctagtcacccaaactctgggccccagtttggtcacctgtacaatgcaggacataacgggacctacctcttaggcttgctgtgaggattgagtaggttaatccatgtgagcttatagaacactgcccagtgctgatgacctgagtggaggtggcgacaaagrcagggatggcacaaatatgtgtgggaggccctgggggtgccaggcagccttggaaggctgctgagaggcagtggagcttcagagagactgggagaggcagggtcaggcaggccaaggtgggagacaggtgggaagctctgggggagagtgctgtgctcccgggatgggctggggcaaggagctgagccagggccctgtca

SEQ ID NO: 217 - DNA, 401 bp, Homo sapiens
gtggccaaatgagctcccacttcagtcaggccttgctgggcttgggtctgagtttcaccatttaccagctgaggggccttgggcaggctactgactctcagtttcctcaggtgtcaggtggtggtgaggttggagagagtggtctcaggtgccctgtagaaggcctgttctgcagcaggctctccgggaagatgtttgcayggggaggaattcctaagagtctttgcagcctcaggagccaggcacaacaccgagctacaacctggtgggatggtctttctcttttagtttaggtatttctttttgaaccttttcttcatgtatgaaagcaatgtgtgattactttagacatttttgtggagtataaagaaactgggaaaaaaaacctcccccttaactat

SEQ ID NO: 218 - DNA, 401 bp, Homo sapiens
tgaagaatgagtgctgggaaagatgtgcaggaaggcattccacatggataaacagtagggcagaggcagggagtgtgctgggagaccagcccagagctctggagagcactgcacagatgcaggaggaaggccaggggtgagcaccagggcacccggagccctggcaggtttcattgaggacctagcctgacccaggctctrtactagggaagtggcctggcagtacatggaggagggggcggctgctatgggtgtctgagcaagaagtgaggcccagtgaccagaaagagactgtgggtgtgaggcaggcgaactctgggatttgttggctcgtgggctatgggaagggcgcccatgaggaaggagccaaaggctgaggcttgaaccgtgaacaagggctg

SEQ ID NO: 219 - DNA, 401 bp, Homo sapiens
ctcagtgaatctggccccaagtccagcatgctcactgctgacagtgggcacccacagaagtgggccaggcctaagtggggtgggaggtgagtgcaggggtgattctggctctaaacagaatcacagtctaacagccatcttgtggagtaaaaggagcccatgcctcaagccacatgcgccgtccagatgtcagaatgcagrtaggcaaggtccaggccatgggatgaggtgtggggtgcaaattagatgccctggtgcaccccaggaccaaggagtgggccgtaagcccattgcatgcctgcccttccagcaagttgtaaggataacaatggaatgtcataaagctcttgtagtttcttgtctgtaaggctaaagttgtaataaacagaaattatgagcaa

SEQ ID NO: 220 - DNA, 401 bp, Homo sapiens
tcgactgtcagagctgaggccgtggaacatcaggcctgccttgcagtcccagcgtttatcgtcccaagtctcagcctatttgttttgtgaccttggagacatcaaaaacctctgtttcttcatccataaaattgaatgtcaaaatattgacctgcctgtggggttttttatgaagaataactgacccagaggatggcaaakcttctttgttaatcagaaaggaccaaactgcttagcaagcacgaacttgagttttaaaaagtgtttgcttgtttgatgtgttcctccctccctccttccccagaagtgcttggtgctggagggatgggaaggatgtgagggagagcctctgcaatcacccatgccctctggggagctaggctcaggggacggacctccca

SEQ ID NO: 221 - DNA, 401 bp, Homo sapiens
tctacctagcaaagttgaacagccattcaccctgcaatccagcagttcaactccaggaactgtgtccttgagaagcccttgcacatgtgcccatgcaggatccttgtgacagaagaaattcattgcagcattttccagcaaagaactggaaacacccccagtgcacatcgataggagtccaggttgtgctaaatacacaargtgcagcagatggcatcggcagcaaatgagctgcaggtgcatgcactatgtgcacaggtttttagtatcataactggcacaatgccttattcatacagttcagaaacttatacaacaaagcaaattactgattaggaatgtgtactacatatgtagtgagcctttacacaatcatacacacgtgtgtataaaaagaaagg

SEQ ID NO: 222 - DNA, 401 bp, Homo sapiens
tcatagcagccaaatccctgactaccttagttcccttcacccctgctccaatccaggctccagtccctccaagttcctcccttccatcaatcatgctagcattttccagccctctgtccaggtttgcctgcctcctcccccaagaatggcctccccagctgctcagctggccaagctgtgcccatttgccctctaaagccygggacaaacaccactgctctggaaagcctgtcccaactcccagtggcagaacttgaccctgactccttagtggtaacccagcccctctgaatcccacagcctgctgcatggtcactgtctattgtgtatctgctgcctgctggcttgtgggtagcctagggcaggatctctcttcattcattcaacacatattcccagag

SEQ ID NO: 223 - DNA, 401 bp, Homo sapiens
ccagccttaccacctgctagtgtgaaaagttgagcagaccatgagacttccatgttaagtgggaattttcacagtgctgcaccagggttagatgaaggtgagatgggggattgcacataaggttctgagatcagtgcttgtctcctactgcatcgttattgttttatcattattaatgtttaagctcttagagtcaaaatmataatgcctggagcgtgggtccactcttttccctgggactccattatttctctttgaagcacaggagccaatccccctggtccctatcaggagccacacagttttggttgaagagggaggggctgagagtctggtaggctcatgggtgtggttatccagcgcaggggccagagaagtgccctatgctcttctttccccac

SEQ ID NO: 224 - DNA, 401 bp, Homo sapiens
aatttttctctttttcagtgttctttcaatcttttgattactttgcagagaaagctttagatttgttcaaagatgtctttaacagtcctctattacattctaacctgctttttaacaaatggaaaacaagaccaagattccagagccttctagtagcaatagtatgtaactaggattattctttgggggtttttttgcatkgtatgtacttttactattagcttcctctgtttatggttagtgactcttttctttaggatactatataaagtctcctttccaggcagatgtaaagaaatatattaggtaaatagtaggtcgggtatgcaaagatctggcaaaaatgatgtggggtgaaggatgtgtaaaagccgaggctggaaccactgggtcctgtcccc

SEQ ID NO: 225 - DNA, 401 bp, Homo sapiens
taaataatgttgcttcatttaaagttatttgaatatatatcaaagttattttgttataacatgaatgaaaaaaatagattggttttgttatacgttctttcccttaaactcatggtttccaagaagctagtgacaatgttaagtgaggatttactgtacaggtctccataactggaaaaaaatgggcacactggagacaawagaataagagaaaaggcacagcactgtttacatcacaggttagaacctggactctagagccagactacctgcattcgaatcccaagtctgggtgcctaggcactctggccagaggcctaacctctgtgggtgcaggcatctctccatctataatatggggaaacagagttgctggaggtttaaatgggtgctggggagca

SEQ ID NO: 226 - DNA, 401 bp, Homo sapiens
ggggcagggcagaggtggatacacagaaggaatcaggagaaactgatgcctccaggaaagggagcagggtgcctggggacttttcaccatacaccttttctatctttggctactgaaatacatgaatgcatcacctgtttacaaataagttaatagaatttaaaaatgtaaaaacaaaccaagaagtgcatttcttctacmcacacaccaggcggacctcccatcctctcctgacatcttctccaaagacagaacattttcctttgatggcttctggtccagcaagggtgacaattgcagccctctgtccccacccaggcagctttaatcagttctcatgcattgtggtcaccccagagagctactactcgggcctctgcatagctaggccctggggttac

SEQ ID NO: 227 - DNA, 401 bp, Homo sapiens
cagcatggcctctggctgggaagccagtatgggttctgggaagagcctggatgtggagtgaagatctggtctgagcagggtcaagattggagtctgagttcccactgcaccatttaccatctgagggggccttgggcccgcaccttggtttctctgtggaggcgggaataagattgagcctacaggcagtttggagaagarcaggtgagggagaccgctgggggcctggcatactgtcctggcacgtggtaaggtttccagggatgtgagttgtcaccctcctttgcccagcacagacccccaggctcagcaccacctgctgagtttgtgctggggcctctccgtgggctgggtcagagggtgtgtgtttgctgctggagagcccttggattttgtcagtg

SEQ ID NO: 228 - DNA, 401 bp, Homo sapiens
gcgtgcccctcaatgctaaagcagacacacacatgaactgtcccaaatcagctggttcaggagcaccctgtgggagaggggccacctatcatgaatttgggccattcaaaaagcttgccacatcttggcaggtacacaaaacaacagccctgggagattttagatttacagagcattgcttcaggagataagatcacgggsacatgtgtgcccttttctgtcctagagtaaatgcccagtgactcagagctgtcattaggaacaagtctattcagcttctcacatgattcttctccagttgggagtcatcaaggtgttcttttctccctgcaaagtgggaacaggaggggctgcggaagctgttgtcccacccgccatccagcctgcctctgtgagtgagt

SEQ ID NO: 229 - DNA, 401 bp, Homo sapiens
ggcttgagcactggcagagtcagcagtagatgaatgaggctggaagaggccctggaggggcagtctgagaattcacatgcccactgtgtaggcgaaggaactggagctcagggcaggtatgagggccaggttcccgactccccatcccatggtctttccactgtcctggccttttcctgaccctggccatgaggctggacygaccactggccacagggttctagcgaacatcacacatctgattctagctctctatgcagccttctgctccccgctcgcccttctgctcagaaggctactcctccaggaagcttgctctggccctcctctcaggatggccactttcccccattcccagccacacgtcccagtggccacttgccatgctgactgtgaatggc

SEQ ID NO: 230 - DNA, 401 bp, Homo sapiens
ccctgggctgctggcaggattgagtggtcagactacacaagggcgtgctgcctggcacagggcatgggcagcagctgattgtactgctgacattgtctcagcctcaggccctgcctgctaccctccggatggctgtaggccctcatgctacaagtcacccaggccaattccattccttctggtcaccagcccatatggacyaatgcccctggccatttcttagaaccatagtttctattcttagagttacttgcctgggacctcaccaacacactggtcccccaaaaccactgaaggggtgtgtccccaactcctgcaggcctggcccagtccatactaaatgacccatatttctagcaaatagagcttctgggacttaggccctgacaaatctgccacct

SEQ ID NO: 231 - DNA, 401 bp, Homo sapiens
acaggttccaggagtggccctgggtgcctgagcaatccaatggttacctgtagctcatcaagtgccattctaaactcagctgactctgtggccaggtgagagagcccaggtggaggaggcaggcaagagcaaggtgggcccaacatccacacaatgggtgccaggttctctcactcgtccctgcctgcctggctccacatygcacggaactccacactccactggctcccagttctctttcagcataaagtgctggggctctgcagtcagacaaaatggggtaaaatcctggctcctcctccctttctcagctgtgcgacctcgtgcaagtcattccacttctcagggcctcatcttgacatttgtacagggcagatcagtgagacgctcttcaggaaaca

SEQ ID NO: 232 - DNA, 401 bp, Homo sapiens
gtgagcagtgagcatgtgcaggccacagactaacacagcaaagaccttccacttgggagcacctcccagcccagtcgtggaatgagtgtggagccacctgggattcagagctctctgtccagggagtggagaagccgatgtggcactggaagagatgcgcaaaggaggagaacattgaggacctgctccgtttgagaaggrcagggagccttcctagaggtggcatctgagctgaggccagagcacccagcgcaagtggcagaatgaaggaaagctgctatgggctgctgcagggctagggctggagggtggcctgcggtccagagggacagagggaggggaggcagagaaggctggtgggagaccgactgcgaagcatgccaaatgccatactaagaggg

SEQ ID NO: 233 - DNA, 401 bp, Homo sapiens
ggggagaggaacagttttcaatggctgaagggacagaggtccttcaaatcccaccatgaacatacctgacaaaacacagcttacctggggtctgccagctgatgggtgggaccctggagacactgggagactcagtccagccctcagcctagagaagctcacctctggggaagaaaccccagcagtccagagggctcaggmagcgaagctggcccagaatgctgcggggccctgggaagggctgtggctgtgcaggttagggtgatgatgatggtaaggccatgccagtggtgaggaaagcccaagcacagtgggcattcctgcttgcagcaaacacctgctgtttccgcctacttctagtaacagcccctggttttccttggggatgcagggttgcaaaa

SEQ ID NO: 234 - DNA, 401 bp, Homo sapiens
gaaacaaaagtctggggccaggccatgacccctgagtgagagattgtgccgctgctgggcacgaagaagccatggggccttcttcccccaggtgacagagggaaattagcccacagtgtgagggttccccaaacctttgggtgcagaacaatcacctattcctgacctaggttctgacattaaatctttcctctttcacargaatcatgagacactgctgactctgctgagacttctgagtcccagttaggcactggtgaatcctgatatgctcactgcttggccagaaggatcatctttccaccacacaagtcagtgtgccaaggctaatgaggatgaatgatgtatttgcaactgggatggtcactgttactggggagaggaacagttttcaatggctg

SEQ ID NO: 235 - DNA, 401 bp, Homo sapiens
ggagacttctttttattttctttaacatgcaaatctccttgaatgactattactattatacttctaggttattaaaaaaacagtttgtgaggtttttttcaaaccagtttggatggaaacaaaagtctggggccaggccatgacccctgagtgagagattgtgccgctgctgggcacgaagaagccatggggccttcttcycccaggtgacagagggaaattagcccacagtgtgagggttccccaaacctttgggtgcagaacaatcacctattcctgacctaggttctgacattaaatctttcctctttcacaagaatcatgagacactgctgactctgctgagacttctgagtcccagttaggcactggtgaatcctgatatgctcactgcttggcca

SEQ ID NO: 236 - DNA, 401 bp, Homo sapiens
acatccagactgccctgacaaagctggcttcgggcctccctgtgggacgggagtgggatgagctgtctgggaacagccagcaacttggagaagtcagctgtcagagtcaggctggcctgcagctggggccagcagccagcctgggggtgtcaggcacaggagagagggctgcctgagtcctgtactggctttcccacactkgccatgaactctcaggggctcctacgagcagctcaccaggcccccagaccactagtaccaccactgtccacaaacactcctccatcctagttcctctgcccaaagaccctcagtggctccctgctgcctgtaggtgggcttatctccctccttggtcagtgtgctaggccctggggatgcagtggtgcacagatccaaca

SEQ ID NO: 237 - DNA, 401 bp, Homo sapiens
cttggcgccctcaggctgggtgttcttccctcccagtgtcctcatccctcacaagtccctgttcagatgtcatcccaccctgggccctttgctgatcactatctaaaggagcaaaacaccctcttgacactcccctctcccgagcagctggcaccacctgtcatacgacacatggatgtgttggcatcgcctgtctcccaycagaacgcccacactgggcctgcgtgattccctcacctctgcagccccgcccccggtgcatgcctgcatagagtaggtgctcgctagcattcttgattaaatgaatgcacagactccctggcctgggtcagccatggcattctccaaaccacagttccttgccctctaaagcagtggctggtgctgtgctcattaattcc

SEQ ID NO: 238 - DNA, 401 bp, Homo sapiens
gcaggctgttaagagctgcagatccctaccccagaacacatagctctgccctcagctggccacctcactcttgcaaactgggtgaagaggagcaaaggatcaccatgctctccgcaaagacaggacccagggaagccacggctggggcacactcaggcactcgcccttctggaagcgcttgcagactccctccaatggccyccacagggcatccatggtgctgggcgcctccctctggcacagcacaagcagaagctcactcctgcattcgttgcttgtctttctgcccatgattgccctcagagcacccgctgggcaccaggcactgtcccagactctgaggactgcctgagtgggccaggtggggccgctatgctggtggagtccacagtccagggggt

SEQ ID NO: 239 - DNA, 401 bp, Homo sapiens
gttgtctctgagccagggcatgcgggacccagagtgggagttaggcagaagagacccgcaccagccccccgtgagggcagcagacattgcagatgcaggttctggagccagccgcctaggttcaaagccaggccccctatgtcctggctgtgggaactgacgcaagtcattcatgccatgtcagctggttgttcctcacckgggagcagggttccacatgtgggccctgcccaccaggcatgcagtcttgcacagacggggcctgcccagggaggcagggtcattgtccccttgtaataggcgaggggacccagggtacctcagctcacccgtgacagaacctgccatccacctgtattctggacaggatctacttccatgggccgaggcacgcggcatct

SEQ ID NO: 240 - DNA, 401 bp, Homo sapiens
gcagagctgagcacctttccagggtactggcctggctgctacagggacagacctgggaaagaggccatgatgacagctgtccttttggtacacacgctggtgtgtcccagatgggagtcctggcgttcacgctgctgcagaaacatgaacaccagctctgtttcactggtgttggctctgtccccaagacccatccttacyagcccttggagcccaggcttctgagggtagagggacacctggccagaggtgctccaagctgaggcctatgcactccaagaccggggggcagcatatcccaggtgtaaaacagcccccacccagccacaatgcaggatctgagcctgtggccactaagagatgcaacctgcccagggcagaggcacagactgtgttttgga

SEQ ID NO: 241 - DNA, 401 bp, Homo sapiens
gtgagagaacaaaaagaggagaaaactagctctgcatttccctgttctttgtcaggcccagcttcctcccagcagagtgggactcctgccaggcctccctcacaggggatcgtggccgtgcaatgaggcggtgtctgtccagtgcacagcccagcacacccaggccaatcagcagccaggaacggggcccagcagagggcygagcctcagttgtagcttagttagccccgagctgacggagacacaatgatacagcaccctcagccacagccatgatcagaatggcagtggcctctctttaccaagcgcttcctggagagagccgggccatgtgtcttattcccaccatccctcaccccaactgaggaaaaaaccaaagctccgagcaggccagtcaagct

SEQ ID NO: 242 - DNA, 401 bp, Homo sapiens
atcatgctattcacacacaccaggaaactgaggcacagagcactcaggaacttgcccaaggtaacacagcaagaacgtggtgggcctgagctcaaacccttcacagcaccacagcctcatgcccagtaggccatccaccctcaggaaccagtcccagctctcagcagctgtgtgtccaactcctgcatggatgggggcttygggagggcggagacgatcccatttgacagtgtgtcccagtgcctggcacagggcttggggtaggaaggatcagaaaagtgctttctgtgcctcaactcatgtgaggagggtacattatccactccatcattgagaggtagaaatggaggcccagggacacaaattgatgtgcccaaggtcacacagtcagtggcagagaa

SEQ ID NO: 243 - DNA, 401 bp, Homo sapiens
ctcccagggccaggctggccctttctcaccaagcgccagctccacacaaaggcacaatgggctgcaggctgccgggtcctggcttgggctggggtaatcagggaagaatgcgggaagcacaactgtttcccaagccctagccatggtgccgccctgacatggccatcaaaggccggcaaattgcctccaattgctggcgtygctttcatgttgggggccagactggaagaggggtctccacgctggtgggtggcttgcatgccccagtgggaactgaacccttgcaagcagcttggggtcactggcccctttgtggccctgtggggctggggccgctctagtcactccagcactacccactgctgtaaacaagcagttttggagagggttggaagagagcc

SEQ ID NO: 244 - DNA, 401 bp, Homo sapiens
ccagcccaagccaggacccggcagcctgcagcccattgtgcctttgtgtggagctggcgcttggtgagaaagggccagcctggccctgggagagtgtctccacgggaagccatgaggagcagtgttgcccccagggtcatggccgcccgcccccactgcatcctggggtttgggttcatcagggggtggagcagggccatrggctccgagaatcctgaggtttgggaaaaaagaggccctactgaatgacagacgtacatgtagcacacacacaccctagcccaccctgccaggtagagagccaccctccagcacatgggagagggaccagggggccaggtcagcctgagacccgagcctggacttctttctcccttgggtcactcaagggcagacaggtg

SEQ ID NO: 245 - DNA, 401 bp, Homo sapiens
gcttgtgaggatgaatccatactcattccctttgttttcatcaaacctccctgagcccgtgtgctaggccctgcacacaatcctggagaggtgccccctcacaggccactgggggaggcaggcatataaggcaatgacagccacagtggtgctgggcagggcacccaggaggatctcacttggctgggcagctgaggggcrccttcccaaggggcagcatcagagtgtgagcatggcaggcagagggaaccacacattccaaggccctgcttggcttcttatagctgaagcatggtacatgatggcgtcagagagggaggaggggtgaggctgagagagaggccagaaagagaatagacgcttctgttggtggagccaggtctagatgtctgacccggacc

SEQ ID NO: 246 - DNA, 401 bp, Homo sapiens
caaaaacgtgccgctcccttagtgggtaagcaaacgggcttgggaatcagatagcctggcgttcccgctctgcctgtaaatagccgtgtgaccttgggcaaggtactaactcttctgtgcctgtttcctcaacacggtgttacgagaggattcagtacctccgtgctgtggggacatctttgtgtagaaatcttctgccgwatctcagaccacttgtttggaccgaattcctagaagtgcctttcttagttcacactgtgaccatctaggactttgtccctcccaggttgtcaccagccagtgcttaaacagctgcccttcaggttcttggaaaaccagagcagtttgcccctcagccccagcagggtctcctccaacgcttatttggagagtgttctctg

SEQ ID NO: 247 - DNA, 401 bp, Homo sapiens
attagaaggtgataagagctataggaaaaatagtggggtgagagggggtcaggggagcatgagggggttgtagttctaaacaagggggtcacaaaggcctcaccaagaggtgacagttgtacagtgactcgaagaaagtgaacctgcagctgccggagctcccaagtccacaggcggagggattggcaaagacaggggccycgaggcagagacaggccaggtgtgcctcccaggtgggtctccaggcagagggattggcaatgacagcagccctgaggcagagacaggccaggtgtgcagaagggcagcgaggaggctgacacaggggcggggctgtgagccaggggcaagcagaggccagaggtccagagcagcccccagtgcagggaggaagatggggg

SEQ ID NO: 248 - DNA, 401 bp, Homo sapiens
ccagaggtccagagcagcccccagtgcagggaggaagatgggggcaggactgcacctccctgacagcgtaggtcctagcagagcgggtggcagagcaggccctgtcctgcctgccttggagacacagggcctgcaggaggtagacaccaggcagatgggcagtcggcactcagcacgtggccttgtcaccgccttcccgcrtactctgaccccaagtcagaatggggagcctggcacacagggcaccgtgtggacatggtgagctgtggtcaccctggagccaggccctcgtaccgcaccacgcatggcacacgccttcatctgccctcagcgcctctcgcataccctaggaattgtcactcaaattccctttgcctgtggatccgtgacagcaatatcta

SEQ ID NO: 249 - DNA, 401 bp, Homo sapiens
gtcaccgccttcccgcgtactctgaccccaagtcagaatggggagcctggcacacagggcaccgtgtggacatggtgagctgtggtcaccctggagccaggccctcgtaccgcaccacgcatggcacacgccttcatctgccctcagcgcctctcgcataccctaggaattgtcactcaaattccctttgcctgtggatcygtgacagcaatatctatggctggtccccgtcatctggccttgggtccagcattcctcctcctcctcctcctcctcccttggagcatgctgaagcagccctgtccccacacagtgactgcggtgctgtttccttcgccacccttctgctgtctggagatctggctgccttgttcactgtctgtgccttcttagatgagtaa

SEQ ID NO: 250 - DNA, 401 bp, Homo sapiens
gttttcccagtggccttttttttcctttcttagccatgtggcaaacatagggaagtgaagagcaacccaggttgtcacgtggtaagagctgctacccacccagccagactctgcgggtcccactctctgcttctcgcaacctgcctctgtgccttttcacttaaaaatattcagggaacatgccagaacaggagataaatrgtggtgaatgcacagaccagggcccagctcccatgcagtttactcatctaagaaggcacagacagtgaacaaggcagccagatctccagacagcagaagggtggcgaaggaaacagcaccgcagtcactgtgtggggacagggctgcttcagcatgctccaagggaggaggaggaggaggaggaggaatgctggacccaa

SEQ ID NO: 251 - DNA, 401 bp, Homo sapiens
gctttccaggtgtggcttcccggccagtccataatagagcagaggtaaacgagcctgaccatctcaggagagcaattaaatggccacatcttcaccagtgccagatagactttccggctctgcctgctccgggcagtgcgaggtatgcattgtgtgtaacgagagccatcgcgggtgagatggactgccgattgggccacrcctgtctccccagcccagcacagacgccggggagccccacgccttctcagcctccagacctcctggcaccagagggagacgggctgcccatgccatttgtcggggtctgctgccagctacctgctctgtttgcagaaggaaggccaggctctgattcagggagtcagatacctacaggccaggcgctcacttgaggggac

SEQ ID NO: 252 - DNA, 401 bp, Homo sapiens
tcgagaggctgaagtaggagaatggcatgaaccagggaggtggagcttgcagtgagccgagattgcgctactgcactccagcctgggcaacagagcgagactcagtcttaaaaaaaaaaaaaaaaagtgacaagggtgctggataaagaggccatctgtagagtcagccagggacagcctgccccactgcacaaagggtcyggtctccctctggcaggcggaagtgagattactggccatctaaagcctgagtcccctgggaagactgaggacatgcagctgatatgaacggggctccagaagccaggcccttgcacgcctgcctgagggacatgtgacactatggccttggggacctgcattaaggaagcgctccctgtgagcagcataccttacttgga

SEQ ID NO: 253 - DNA, 401 bp, Homo sapiens
gcacttgatggctacaaataaatgtcccgtggccccagcccactctactggtgtctctctctctgtgacttcactaggtccgccgccctccccagctgtgttccaaggggaatctcagaaatcccaagagttcctgcccaggtcggggccagggaagggacccaaactcagagtctgtaggctgtgggagtctgcagagtrtctgcgcttctcaaccccactaggtggctcctggggcgctctgggccttcagggagaatggggattctctgggcagctgggtccagggaaggtacccacagggaagttggggaatagcagggtgcctggccagagcatcaggcagagcaggtggaggcttgttcctccaccccaacacgaggagtccctcagcccctgcc

SEQ ID NO: 254 - DNA, 401 bp, Homo sapiens
cagggccaatcccctcaggggactgaactgggaaccccacttccccatggctctcagctgttgcccttgactgctgctccagccctgctgcctgggtctgggccaaggttgacgaagggtggctgggccagtcgccatcgctggtatccttgcagctcgggggctttgctctgctgttggtgtatttaattaactgcctgytccccacccaccacgtgcacacgggacacacacacacacacacacacacggctctggggcttaacaggcccaagtcatttgatcgaaacctgcccctgttaatatttttaatgccatttgcaaattaaagcataatgcaccgattactgggataaaagggaggcctctgcgtctgtctggagaccaaataaaggaacgtt

SEQ ID NO: 255 - DNA, 401 bp, Homo sapiens
agtgggaatttgatgctattaggagtggacttcacacaacaactctggagggccagctgccacgtctattaaattaaaaatgcatgggccccatgagcacaagcactcactcacatgtgtgcacaaagaagtggggcacggctgctggtggcagtcctgcctgaaacaggagaaaaaaaatggcaatgttcatcagtagtsgtgtggacactgaaacagtgctgtgtggccatagagtgaaatactcaacaataggtaaaggaaggaagtctgagtgtcctgtggataaatcctgaaaacaggtgaaaaaagttgcaaaaggatacgtgcagaatgatgctgtttacattgaacagaaactccacaaagtgatactgtgtgttctgtgaatgcaggcatgg

SEQ ID NO: 256 - DNA, 401 bp, Homo sapiens
taaattaaaaatgcatgggccccatgagcacaagcactcactcacatgtgtgcacaaagaagtggggcacggctgctggtggcagtcctgcctgaaacaggagaaaaaaaatggcaatgttcatcagtagtggtgtggacactgaaacagtgctgtgtggccatagagtgaaatactcaacaataggtaaaggaaggaagkctgagtgtcctgtggataaatcctgaaaacaggtgaaaaaagttgcaaaaggatacgtgcagaatgatgctgtttacattgaacagaaactccacaaagtgatactgtgtgttctgtgaatgcaggcatggatatttaactacatggagaaaggcgtgcaaggatgtgcttcaaactgaccaccaggagctgccagcaag

SEQ ID NO: 257 - DNA, 401 bp, Homo sapiens
ttggctggcttgggcttcttaggcgtgcgcggcccccgcttcatgtctgtgcaggagtcggcagctggcgccagggcggccggaggatgccgaggggccggagccgggagggcccgaggccgaggcgcactctacccccagctcctaccctgtaagccccgccagcctccggacgtgctgtccctgggcccgtcgccctckgggctcccgccggaactccttcactctcagaggccgagtccctcccctccccacggctgcgtgtgtaagtttggggtttgagagccggctgggggcctggggcgctcctagctttgaggggactctggggggacttagggcggggggccaggctgcgggcgactgctttggtgtgctttgttgagaggtcctgattgtgc

SEQ ID NO: 258 - DNA, 401 bp, Homo sapiens
aaaattctgcttcctggctgaccttctccagtcctcagagaaatcttgttcccaagtaaggaaagtgacagcttcttaatgtgatcaaaggcagcgccagcatttccaactatactcccgaacgaacaaagtactgaaaaagggaacgcgtccctctaaaggtgttttggggaccccaaagttccagcccataaattggartaaatctgctctcaccaggcctggaacagcgcctcaagaccccagcagattctgggggctgcgttgaccctccccgggagtttgtttggggcccaaggtgggaggaccatgtcttcggcctaatggggaggggcccggttggtgtccctcggtctgcctggcacacacagacattgtcgagcgcgggtccctctttattg

SEQ ID NO: 259 - DNA, 401 bp, Homo sapiens
agactctccccggggaccctcaggagctgtgagcacacgcactcactgataatggtacacagacgcccgctcctctgtcttcaacccacttccaggagtgctcacacggacacgcacacatccctgcacatgtgcacacagctgtggccgcgaggacatcctcagacagacggcctgggtcacaccgacacacatggccayacaatcagatgcaactcggcactcgggctcacactcaggacgccctcactgccaggcttgtttagctaagtgcaggcgcagcccctctccctgtcccaccccccctccagttcctaacgctgggggaccccctgagcactttagaagtccactgtctggtgtccccctggcccatctccttggggcagactctcacaatg

SEQ ID NO: 260 - DNA, 401 bp, Homo sapiens
atgcgcccgccatcgaatgcatcatttaccaccgcagatccgagcgctgatgggcaggcagatagccctctgctgggggcacgcgggctccccgtgcccgtaccactcgcctgcctgccggggccactgagtgtgcgccccggtgtgcccggcgtgtttggatggacacgtgggtgtgccagtgcatgggctaacgccgaygcaactgtgcgggtgtgtcaaacaagtgtaccacaaaaaagtgcaggtgtgcgagcccatccatgcacacgcatggcaggcgtctgtgctgtgtccggaggcggccgatgaggcgggtggagggttcacacaggaggcggtgctgcactaagcttgtgggcaggcatgcggcccagggtggctggacacgtggtggagga

SEQ ID NO: 261 - DNA, 401 bp, Homo sapiens
ccgcacacacatacccctgcacacatacccagccacgtacagctgggtggctgtacgcaagtcatttttccactctgagcctcagggtcttcctctgtccacctccccccaggattactggcagaattaggtgtgagcttgcatttaaaaagaggtttgttttgtaaacccaggctttgcaaattggcagcccaagtctcrggggcctgtgcagtgactgatcattaccaacatttcgaagtgagagatgtcacataaagagcgtcatttcgagcttctcttgaaaagttgtaaggtgagctaccctgggactgtattcctgaatggcaatgtgatggcagagtcctgcagtattaccacctgtggacttgtgcaccagggttcccacccacccacttcag

SEQ ID NO: 262 - DNA, 401 bp, Homo sapiens
attcttgccaagtttccaggttggactctccatggatcctccagagtcatgtgcccagaatcaatcagccaggatggctctgactggctgggccagaggtgggtgctccacatggaccaccttgaactgagagtgggagggggtggtccctggagggaaaatctgggtgcggctacctggatatggacacacagatgctgytgcagtgatccactggatgcccagttctgggcccctgctgtgtcccatgcaggtggtctggacaggcacagggctgacccgtggtccttgcatggagtcccgagttcccctcctctaacatcccaggccttggctccggatggccccatgttctgggcctcaagcattcatctctggaagggcaagacctctgggacctc

SEQ ID NO: 263 - DNA, 401 bp, Homo sapiens
tccttgttagtgttgccaaattctcttacaaagtgcactttccaaaaaacactcccaccagtggcgtgcagagctcctgctgccccacctgtccactcacatttggacctgtcaattaatttaatttcttcctgcaggatgtggatgaagccatccccacgcatttgccgggccacaggaatatgcttcctattcctttgycagtggttggtagcatccatgtactttgcacaggttttgccacagttagagtgcatagagggcaatggcaagcagagccccagccctggctgcatggctgtttctctcttcctgtctgtctgtctctgtcctttctctccctgatgaggacatgcccactctctgccctggtgggataggagctcatcatggaggattct

SEQ ID NO: 264 - DNA, 401 bp, Homo sapiens
agaatggtgaggttggcaagcggcggagacattccccttcccggagtgcttctccatcaccacgaaagcaccaaaaagagacttcccctcatggtagacggaggagaagtccatccccaccacccaccagaaggcgacggtctccttctcccgcccctcatcctcgacggctcaggactcccacaccaccaccaccacgasgaaggactccttctcctcccctacgtcggcgctcaccttctcctagaagatactctcctccaatacagaggagatactctccttctccacctccaaagagaagaacggcttcacctcctccccctcctaaacgaagagcatcaccatttccaccaccaaagcggcgggtctcccattctccaccttccaaagaagctccc

SEQ ID NO: 265 - DNA, 401 bp, Homo sapiens
gggagggaagacaatagacttttttttttttaaatttttaaatttagaaatttattctgtttaatccacaagctttatatagctttagtttaaaaaaaataaaaaaaaaaaatcaaaacaaaaacagtgaaaccgagacactattccaaagtctgggcccttccagccttccaaatacaagaggctctgaaagttgtatayaccaattggaagaacaagacaaaaatatgaacagagccatgacatttcattaaacaaattgtatgtaactgaaggaatcctttctgggactagttcatggcctttacaaaagaaaaaaacaaaacaaaaaaacaaaaccagaagaacagaatgagagtccagtgttccaaatcaagttgttacacatcaatataaaccca

SEQ ID NO: 266 - DNA, 401 bp, Homo sapiens
tttgaaagcacttggagtagaagaggtataatctgaagttgttgcggtcagtaaacagaaagacccagggaggcagaaacttactctgcatgagtgagaagaaaggattcattaattcaatcctgaaaagaagggtgagagaaggaagagaaattaagggttgatcaggagatgggcagtccaggaagagaagaagagtcwgggactattgaagagccactattgcatattgcttagggtaggggagggaagacaatagacttttttttttttaaatttttaaatttagaaatttattctgtttaatccacaagctttatatagctttagtttaaaaaaaataaaaaaaaaaaatcaaaacaaaaacagtgaaaccgagacactattccaaagtctgggcc

SEQ ID NO: 267 - DNA, 401 bp, Homo sapiens
caactaagccaagaacatatttgcaacgaagtagaagttatttccttaagagcttctggtgacaagggattccaaataatccctgaatagtgaaggatttactattgcacatttaaaatgtgtaaaatgttttaacattgtcttacaatgatgtctttattattatatgttagtaaattaaatatttacttataagttgtrtagatttattagcaacctcagttcttcatcccacttttttaggttcctgaaattaaattacatagtcttgttagaaatgcttgttccccggtgccataaagaaatagcacttgaacataaatttaatttcctcagcaaggcagtttttacctattgcagaaagggtacacttgccagcagttttgccacaagagtacacc

SEQ ID NO: 268 - DNA, 401 bp, Homo sapiens
taaaacctcgtctctactaaaaatacaaaaaattagctgggcatggtggcacacacctgtagtcccagctgctcgggaggctgaggtgggagaatcacttgaacctgggaggcagaggttgcattgagttgaaatcacgccactgcactccagcctggtgacagagcaagactccatctcaaaaacaaacaaaaattatartatgaaataggcattaaaatattgtgtattttagaggagactgaggattggaggctgaagaattactctaaattaatcagcttgtgtacttcagagctaagatagctctttgggttctaaattctgtgatcttctttttgatttctcttggagcaataatgaaggcaaaacatcaataaacataacaaactgggtaaggg

SEQ ID NO: 269 - DNA, 401 bp, Homo sapiens
agttatattttgctccctatctttccataaactatctcctaaatctgactaaacatgtccctcccagggaagccacttagaatcatgggaacccttccaccacctatacatccctcttctcctccacttagaagaaatttatttgagcactttaatgtacctggcccagtcctaggagctggaaatatagaaaatacaagyttttccttcaagaagctctcagtttaaaagaaaatgagaagctcaagagcagagaaaacaagttactgagttttggggtcagctctatgcttcagagagagtgggcaagagcatcttcaggtttccaccttaagaatccatttcagttcttcaggaagaaatagtgcccagcatttgggtgtgacatgcccttctagata

SEQ ID NO: 270 - DNA, 401 bp, Homo sapiens
ctacacaaagtttcaggtcagcagccaggatttgagcttcagctctcttaccatcccagagactagaggagcccctggattcaaatgacacatctcagtggacactgagaaaggtttaaaacagattggacctctcagctggcatcatggaagtaggagtcaaaagagacttgctgcaaggtcactggaggtttagaaaargacagatgttctttgacattccctggttccttcttagagagacaaacataaacagagaaaatcagtttgtcctttgaagaagttccagatggaaacagcaaggctgtcttactctgtgaatgtttccttgatccatccccaccgctcccagcaaagcctgaatcccttggtcaccactgtcctgtaaacagccctctaat

SEQ ID NO: 271 - DNA, 401 bp, Homo sapiens
tatacttgggattgatggaaaacttacagaaatgttctgaaatgcaaaaatgtcataatgacctagccatagctcacacatgaatcctcagtgtgaaccaggaatcaaccacttgtgaccacaaaagggaaaggaggaagaatacaagtctttccagctctttattgcccgtgcatcttggatatgttgagaaacctttaytgactatcttcaagtcagtttattaatgctctaatattttttatttctgtcatagtatgcatatgatgtattagacagggctctgggtacagatgggcagggtttaaatgacagatttaaggcagtggctcacacctgtaatcccagcactttgggaggccaaggcagacagatcacttgaggtcaggagttcgagacca

SEQ ID NO: 272 - DNA, 401 bp, Homo sapiens
cttcttcatttctgtttaggggccccagatcattgagattcttctttcctattaactaccaggttatggatttgaaagaatctcagttagaaatataatagcatcattctagacagaagaatggaaaactagtgttctaaactggatcaaagggtgtcttgtgaaataatgcagtcattgttctctatagttttgctccartaggtcaaggatatactagtatatcaggggtagctatggatcctgggatttcccctttaccacaaaggagatgatgtaggtgtgaaattccaggcaccttgcccatcttttgtaatccattcttctttttttctctctaccggttgcttcagattgtaactctacagcccacctggcttagagtgctgacgccttctcaa

SEQ ID NO: 273 - DNA, 401 bp, Homo sapiens
tatctgtgcctccttcctcgcagcagggaggcgttcagcccgcccctgcccgttccctgccttgctcttttctaagaactggaaattattcctgagatgagaggaataaaacatacataggacatatccagtctatttctgaagcagaacatggagaaaacctagcgaagagattacaaaaaaagataaaagaagttttcytcctagtcctcactcccaatcccttcctgcccaagtttatgtctgctaagggctcctctcatcagcccaacttcctgggctgctttcaggatcaggagagagaggagcttcataatatttccatgtttactttttaggcaaggataggtaagaagggccccattcacagaagcactgctcagacaggatagcagatggcg

SEQ ID NO: 274 - DNA, 401 bp, Homo sapiens
attgggacacagaagagggataccagcatcaaaaaggtttcctggaggagacacatttgagccaggtgaaaggaggcaggatgaggtacatttctgaaagaggagatttggcaaggtcacagaggcaacagggatttggggagtgagacgaagcaaagtccgactcttattgcaggggtaggaagctagggaactgtgggyagagatttgaaactgccacatggagatgtggagagagtgggagcactggagggccaatggggtgttggtggaacaaggtcaaattgaaatgtttggatgacagcttcgagtgaagcaaaattagaaatagggccacctcataaaactgaagaatcacacttcagacttgttccgggttaaattttgtttacaaaagcagg

SEQ ID NO: 275 - DNA, 401 bp, Homo sapiens; identical to SEQ ID NO: 2

SEQ ID NO: 276 - DNA, 401 bp, Homo sapiens
ttccaatgaagaaactgacataacagggagaatgaagttatcatttaccaatacaaggaagactctagaaaaatcaggtttggggatgaagatcagaagctccattttgtgcatgttaagtttgagatatatgttcatcatcaaatggagatattaaagaagacagttgcattacgactgtagagtttaagggagagatcygggctaaaagtataaatttggaagtcatcagcacattggtgttagtaaatacaatgggaagaatgaactctcggcacaagcaccaggtgagtacaggcggaaaagaggagtggggccaagacctgagctgtggtcttggtgctgagagattaggaagactgggagcaactggcaaagaagattgataagaattggtgagt

SEQ ID NO: 277 - DNA, 401 bp, Homo sapiens
tcaccaattcttatcaatcttctttgccagttgctcccagtcttcctaatctctcagcaccaagaccacagctcaggtcttggccccactcctcttttccgcctgtactcacctggtgcttgtgccgagagttcattcttcccattgtatttactaacaccaatgtgctgatgacttccaaatttatacttttagcccggmtctctcccttaaactctacagtcgtaatgcaactgtcttctttaatatctccatttgatgatgaacatatatctcaaacttaacatgcacaaaatggagcttctgatcttcatccccaaacctgatttttctagagtcttccttgtattggtaaatgataacttcattctccctgttatgtcagtttcttcattggaaat

SEQ ID NO: 278 - DNA, 401 bp, Homo sapiens
cctagttctggtcctgctctgccacccctagcttagattacataggagcacaaaatagcttaatttaccaagagtgcatacattggggaagaaatagttcaccaaaaagaaattggaatacaattggtgaaaataggctgaatatatgatgtgtggcctgaaaaaaaatatccattacaaacatgaagatggctgtgatayattgccaaattcccacaaccttttatagcccctgtatccacatcctttgtcatgtaaattttcagctccctccctttggatcaggtttatatgtttgatgagctttgaccaacagaatgcaattggaatagaacaatattgggaaaatcttatttgttttaaaacttcattcaaaactagtcccatgaaaaggcaaactg

SEQ ID NO: 279 - DNA, 401 bp, Homo sapiens
gtaaatttttcttggattctcaccctgcctccaatcattcttgtgaacacctgatgaaatttgtagtctattgagaagagccagtgaatagtgtgaactcccatttctctgtggcttgcagggattccataatcttatcttaacccatactcagcctttaccaatttttaaaacattagttgaattatcatcaacagcttrtatggttacttgtggcgtctatcctaagaaaacatgtgttcatgtcctggctcttcctgaaggcatttttcttttttttttcttttttttttattatactttaagttttagggtacatgtgcacattgtgcaggttagttacatatgtatacatgtgccatgctgctgtgctgcacccactaactcatcatctagcatta

SEQ ID NO: 280 - DNA, 401 bp, Homo sapiens
tctatggctttattccaatgctacacaggctgctatttttctctttgaaatatgagccatgagtaaatttttcttggattctcaccctgcctccaatcattcttgtgaacacctgatgaaatttgtagtctattgagaagagccagtgaatagtgtgaactcccatttctctgtggcttgcagggattccataatcttatsttaacccatactcagcctttaccaatttttaaaacattagttgaattatcatcaacagcttatatggttacttgtggcgtctatcctaagaaaacatgtgttcatgtcctggctcttcctgaaggcatttttcttttttttttcttttttttttattatactttaagttttagggtacatgtgcacattgtgcaggttag

SEQ ID NO: 281 - DNA, 401 bp, Homo sapiens
atcgcgttgtcccttgacaatatgttttatttctttgtgtcttattttttgtatacctcataatatttttatatgacaagactgatatatgtaatttttatgaatcaattgggtatactgtgaattttgccaggattttgggggaagatagtctttggtttgagtcatttaagtcagaaattaagctcagtttgggatttrttactgatatgcttatggtatttggccattcttgcattgctgtaaagaaatacctgaggttggggaatttattttataaaaagaagtttaattggctcactgttctgcaggttttataggaagcaacttgctggtgtctgtttctggtgaggtcacaggaagcatacaattatggcagatgatgacaggcagccaatatg

SEQ ID NO: 282 - DNA, 401 bp, Homo sapiens
tattttttccactactcttgctgtttgcatgttgtatttcagattgtataatttctaattacctaccttcaagttctctaatttttttttcagttgcatcaaatctagtgatgagcccatcaaaggcatgcttcatctctgttacagttttattcatttctaacatttgcaattaattctttcttaaaattttgatctctytgctaattcacctgatcatgcaatttatgtatctttttcactagagtctttaatatcttaatcagctgttttaaattccctgacgttttcaacatctatttcatttctgagtctggttccattgatcgcgttgtcccttgacaatatgttttatttctttgtgtcttattttttgtatacctcataatatttttatatga

SEQ ID NO: 283 - DNA, 401 bp, Homo sapiens
cttctggcttgtatagcttctgacaaaagtctttgtttttattgacataatatgtcttttttttttagctttgctgccttaaagattttatttctgcctttgttctacagcagttcaaatataatatatatagtggtgtgtgtgtgtgtgtgtgtgtgtgtgcgcgcgtatgtgtgtgtgtttatcctgtttcatattctmtgggctttctggatatgtgatttaatgtctttcattaattttagaaaattttcagccattatctcttcaaagatttcttttgtcctattctgtctcttctctggaattccaaagacatgtactgaatgttaaatagtttgatattttgaatagctcttggatgacctattattttttccactactcttgctgtttgcatg

SEQ ID NO: 284 - DNA, 401 bp, Homo sapiens
ataatggttttatagtactaaaagtcagaaaagtcactctcctacttataatatctgggtgtagtcatcaaagcttcctctaatgtgtctgctggtggggaattaattacacagtgatatggcttattttagtttctgatatatctatatattagatagatctttgctttataatccaaacttgatctgcctgtaagcacrtatttcaaaagcaaataaaatcttttgatggcctagaatttggtctgtcttggtaaatttgccatgcacattgaaaagaatgtgtattctactgttgctgggtggattgctctgtaagggtcgattgggtcaactttgctgatggtgttgtttagcttttctgtatgtttattgactttcttaatatttgttctatcaat

SEQ ID NO: 285 - DNA, 401 bp, Homo sapiens
tcttagcattatcaactatgaaaactatatagagaaaattgaacacaggcacacttattcaaggacctatcttattatctagagtgaagctggtttacagaacaaagactatagaggatttaggagagtgaggacacagtcagctagaggtatggagaatgatgactgaagaaaatttcagataaaggtatattaatagayacaacctacctaaattctctcttctggtagtttaaagtcatggtaagtagagtcttagataacttgtggtatatctcaggcccactgtagagtctgagggtacatcaattagactcacacttacagtggttctccttgtatctgttttatattttagtcttctctatatggtttaatttgaataatggttttatagtact

SEQ ID NO: 286 - DNA, 401 bp, Homo sapiens
atgcaatattttatatgttcctctatcccttgagcttataagacaacctgagacataattcgtgtcaataactgcttgctgataaaaatgtaattgccatccaaattgtggtaatagagcatgtgggaatatgatgttctttgtgggacccaatgaactatgggcccatctattcatagtatagtcagaaataggactctmatacatattgcagttcttcacatctcaagacctagcataaaatctgtatttttatatttattaccattcattcatttggatatgtacttgctagaaagaaagttgaagaaggtgcaaaaaaagtatgagggaaaacctccaaattgaaaaaatatattttttaaatttgtttattctctcttctgtaaacttggaacaga

SEQ ID NO: 287 - DNA, 401 bp, Homo sapiens
gtttcccatatgtgatatcacatagttaagcccccacctccccgcaaaagattatgtgtgctgtcgcactcttcttttttaaaaataaatatttcttaccctcgaggcctctccagacttcctattttgggcagtttacaccacttgaccctttctgattattcttgtccctcaacagcagacttaagatacaaacctccytctctcattatactcctcctctttcaatccttatgaatgtgccatttacaatattaccttgagttaggtggatatctctttgcatctcttatcctaactgcattatgtgtgaaacttgttgagactttaagaatgcatttttaataggataatagtctttcctagtcatcctgagtactcagcattccccaaaagtgcca

SEQ ID NO: 288 - DNA, 401 bp, Homo sapiens
ctaccacagcgactgttgacaaagcagtccagcgctgtcactgacatattaagatataaagtcgttgcagaaaacagatgcttgaaccaagttgtgagggatgtgaagcgttcactagccagggcagataaaatagagaatgatgagtagaaagaagagcatgttcagagctgcccagatatgagagtgagcacatggcasttttggggaatgctgagtactcaggatgactaggaaagactattatcctattaaaaatgcattcttaaagtctcaacaagtttcacacataatgcagttaggataagagatgcaaagagatatccacctaactcaaggtaatattgtaaatggcacattcataaggattgaaagaggaggagtataatgagagagggagg

SEQ ID NO: 289 - DNA, 401 bp, Homo sapiens
atgaaatagggggatttttctggattattaagatgggccaaatgtaatcagaagggccttataaagcaaagaagtaggcgagagagagtcagaaatgatggaagcagagttagagtaatgtactttgaagatggaggcaggtgccacaccatgagcaggaatgttgcagtctctggaagctgaaaaaggcaaggaaacagwttctccctagagcctccaaaaggaaaacaactctgccagcagcctgagtttagcccagcaacatcagtcatctgacctccagaactaagaccataaatatgtcttggcttaaaccaaatttttcataacttgttacagcagcattaaaaaaacccaaaatggccgggcacggtggctcacacctgtaatcccatcacttg

SEQ ID NO: 290 - DNA, 401 bp, Homo sapiens
gggtttcaccatcttggccaggctggtctcaaactcctgacctcatggtccacctgcctcagcctccccaagtgatgggattacaggtgtgagccaccgtgcccggccattttgggtttttttaatgctgctgtaacaagttatgaaaaatttggtttaagccaagacatatttatggtcttagttctggaggtcagatgmctgatgttgctgggctaaactcaggctgctggcagagttgttttccttttggaggctctagggagaatctgtttccttgcctttttcagcttccagagactgcaacattcctgctcatggtgtggcacctgcctccatcttcaaagtacattactctaactctgcttccatcatttctgactctctctcgcctacttctt

SEQ ID NO: 291 - DNA, 401 bp, Homo sapiens
ggcacacaccaccacgcctggctaatttttctttttttagtaagacagggtttcaccatcttggccaggctggtctcaaactcctgacctcatggtccacctgcctcagcctccccaagtgatgggattacaggtgtgagccaccgtgcccggccattttgggtttttttaatgctgctgtaacaagttatgaaaaatttsgtttaagccaagacatatttatggtcttagttctggaggtcagatgactgatgttgctgggctaaactcaggctgctggcagagttgttttccttttggaggctctagggagaatctgtttccttgcctttttcagcttccagagactgcaacattcctgctcatggtgtggcacctgcctccatcttcaaagtacatta

SEQ ID NO: 292 - DNA, 401 bp, Homo sapiens
gtacccatgatgattcccacctcacaaatgagaaaactgaggctctacaggattgggccaatgtccaaagttacccagaaagaattggtaagctaggattcaagtgaagatatgtaacattccaaagccctggctctcagtgactaaggtctaagaccacccagatagttttgtgttataaatcctaccttcccttcaacrgtccttcattgccatttgcctgaacttgagctacttgactgaacttttccttaggatgagttctttcccagaaatgtctaatgaatactatttcatgcaaattgatctcaggtcctccaaagatgattggagagttgtggatctttacacagggacactgctcagcaaagaggctatcatcacttaagactgtcattcat

SEQ ID NO: 293 - DNA, 401 bp, Homo sapiens
aaaagtaaaaataagccctgtgctctgaagccactgaggctttgacaacaaagctgatgagatggcaggtcacaggtaaggagacctgagtgtagaagattttaaagagcatgcctttcaaagtaaagggaacagaggaagaaaatgatttttgtaattacaatttaaaaatactgattaaaaaaaacaaaataacttagmatgggttaaagagagacaagatttacagcactgggaaaaccaaggagaacccgtgcaaagtgttgtcatgggattaagctattgagataagccctttccagctcgaatagaatgtattagtttgaaagcaaagtgggctttgtctctgccacttggtccatttgatttttattttctggtcaacttgacctttgagtctt

SEQ ID NO: 294 - DNA, 401 bp, Homo sapiens
agaggaagaaaatgatttttgtaattacaatttaaaaatactgattaaaaaaaacaaaataacttagcatgggttaaagagagacaagatttacagcactgggaaaaccaaggagaacccgtgcaaagtgttgtcatgggattaagctattgagataagccctttccagctcgaatagaatgtattagtttgaaagcaaartgggctttgtctctgccacttggtccatttgatttttattttctggtcaacttgacctttgagtcttactcaagtgatttttgacctagttgtggcatagggcctgaagctatataaaacagtaacttatttgattacattgctcagccactataagattccttcatgtttttccctatttttgaaaacgttttctcacc

SEQ ID NO: 295 - DNA, 401 bp, Homo sapiens
tgccattatagctaaacagaagccatagacaatgtggccaaggacaaggatggtgaagtttccataaaatttgatttacaaaaataggctatgggatggatttggcccactaactgtttgccaacccctggcctagcacaaagttaaaactcaataaatattaacagtaattgattaaatcaaaaacacatttactgagcrccttctatgtgccaggtactatccttggatagaggataaagtattcagtgacaggacacagttcttaccctcattgagcttacagtctaattcctaaataagttgttatgaaatacaaagcaatatgaatgaaacaactgtggttttgagataaataataatcagaaacccagatcatctgacatcaaagcgtacattct

SEQ ID NO: 296 - DNA, 401 bp, Homo sapiens
cgatttaatcctcaaaacaacttgatctggaaagcgttgtttatctacattttcagacaaggaaagtgaggcacagaaaggatgagttgcgtacagttgcacggtgaggaggtagcagagctcagatggggaagtactaatgtgtctttatgactccagagcccaaacgcctcgcccttacattagaaccctcaaacttaytcagctggaattgcctcatctatacactgggaattatatttgccttttaacttaattatacataaattagctggcatactgtagacacccaatatcagtgtctctttatcaatgtaacgtatgcatgatgtcatggaattagcacataatgctgatccgctactcctagtgacaaatccaaatgtctgaatatgtctctg

SEQ ID NO: 297 - DNA, 401 bp, Homo sapiens
atacataaattagctggcatactgtagacacccaatatcagtgtctctttatcaatgtaacgtatgcatgatgtcatggaattagcacataatgctgatccgctactcctagtgacaaatccaaatgtctgaatatgtctctgtaatcaaggttttattttgcttcatttttaagccacaattttgagtaaaattcttctmcctcttgataaacaagcagtgagtggtggcatgtgcagagagatggaaggagttaccagtggacgtgttgcctctccaagacaaggccaagcagccagttcaggaaataagataaatggaagtggtggcagggcctaaccctatccacacaagtaaaagtcataaggggtctcagtggtatcatttttaagaagacaatc

SEQ ID NO: 298 - DNA, 401 bp, Homo sapiens
ttagtctcctgggaaagatagctctttatactgataatatgccacattttcttatgggtcttgatggacatgcacaaagtttaaaaatatcacaaaaaggagagatgattgagagtagctgatagagggtgaaagcagactttacagggtactggatgccgtaatagagctgtgagcactaaactggaatgtgccaaacasaagagagaatcgtggtgcccttcctggtagaggaaaaaaaaaaaaaaaacacgtgcaagggcagaggaaggaaaccatctggcataggatgccacttcttatcttaaatgagaaatccatgacctccagccatcaaagcttcattcattcacaagtcctctctggatccatccactgcgaaaaggagcccaaagataatg

SEQ ID NO: 299 - DNA, 401 bp, Homo sapiens
tatgggtcttgatggacatgcacaaagtttaaaaatatcacaaaaaggagagatgattgagagtagctgatagagggtgaaagcagactttacagggtactggatgccgtaatagagctgtgagcactaaactggaatgtgccaaacacaagagagaatcgtggtgcccttcctggtagaggaaaaaaaaaaaaaaaacaygtgcaagggcagaggaaggaaaccatctggcataggatgccacttcttatcttaaatgagaaatccatgacctccagccatcaaagcttcattcattcacaagtcctctctggatccatccactgcgaaaaggagcccaaagataatgaatttgtaaaattttcattttcaacccttaattacatggaatatattgagct

SEQ ID NO: 300 - DNA, 401 bp, Homo sapiens
gtaatagagctgtgagcactaaactggaatgtgccaaacacaagagagaatcgtggtgcccttcctggtagaggaaaaaaaaaaaaaaaacacgtgcaagggcagaggaaggaaaccatctggcataggatgccacttcttatcttaaatgagaaatccatgacctccagccatcaaagcttcattcattcacaagtcctytctggatccatccactgcgaaaaggagcccaaagataatgaatttgtaaaattttcattttcaacccttaattacatggaatatattgagcttctagcatatagcttggcatatagtaggtgctcaataaataatattaaatttatattaatataaagggaaaatagggaactacaaaaacgtttttgtcagtagcaatt

SEQ ID NO: 301 - DNA, 401 bp, Homo sapiens
tgctcaataaataatattaaatttatattaatataaagggaaaatagggaactacaaaaacgtttttgtcagtagcaattttcttgaggtattctttcttaatcagtcatactctcttgatatgaaatttaattccattcaacaagcatttgccgagtgtcagctgtgtttcaggcactcaggaagacaggcagagctgcytctcagctggtgcgcaccagaatgttctaggaggcttccatcttggttggctggagagcatgattgccagttgtgaatgatgaatatctccctgagtccagagatgaatcagatcctgtccttgctctcaatgatttacaatcagctgggtcagttgtggatctttcttgcagcaggaagtttggagaccagccctgcca

SEQ ID NO: 302 - DNA, 401 bp, Homo sapiens
cttgaggtattctttcttaatcagtcatactctcttgatatgaaatttaattccattcaacaagcatttgccgagtgtcagctgtgtttcaggcactcaggaagacaggcagagctgcctctcagctggtgcgcaccagaatgttctaggaggcttccatcttggttggctggagagcatgattgccagttgtgaatgatraatatctccctgagtccagagatgaatcagatcctgtccttgctctcaatgatttacaatcagctgggtcagttgtggatctttcttgcagcaggaagtttggagaccagccctgccactgaattactgcgtaactaggaacagccactgagccacttacaaatgagtttctccacatgtagtcagtaataatctcacct

SEQ ID NO: 303 - DNA, 401 bp, Homo sapiens
ggtatcttctgtgaatttttttctatgctgatacctaatatctactcaattttaactttattagttgaaactcagaatatactaatcttcagttatgttatcattatgtcatcttcaggattagctatgaaaaaattacttccatgaataaaacatctgaaagaacaaaatcacctaagaaaatcatacaaaatatggcarttagctcaggctcccagcttaggcttaacctcagcaaacttccaggagagatgccaatatctatagaaaactgggttcccccattattttcaggaggctagctctgtggtggatgaaatgctcctcccacaatgatgctgtgttttctctctcttaacatcttgcggtgtgactgtttgctgccatttccccataaactg

SEQ ID NO: 304 - DNA, 401 bp, Homo sapiens
ctcctgatttttaagtaatatttctaatttatagtcacaaaataagttagtatggtaagtgggtggatgagtaagaaggaagatcttttccatatactggaaggctttgtatatagggagcttttaaatgattctgatactgacatcactattccagagcaatttaaggcatactctctgagggacaggacccaggctttrgtattttagaagctccagaggtgattctaattttcagccagggttgccaatcaccttttatagttgccaacgacagcagtgatgctcaaccttcttgtgcatccaaatcaccctgggcagtttatgaaaaatactcatcctcagtctccacactcagacattctgattcagctggtctagggtgggaaacaggtgtcagg

SEQ ID NO: 305 - DNA, 401 bp, Homo sapiens
cctttctttttggctttctctcacaaagtttctttcctgctgccgaaattctcttctcccttccttcctcttggaaaactctcacctacatagttatctaccgtactaggaagacttcctgctgtaccggtgaacagagtcacctttgtaattttttataaaacaaaattttctttacttctataattcccctgatactayactcatcttaggggcttagaattaaataatctttacatacctggctcagttgtgacctcctccaggaagtcatccttgaggccccacttttcagtcttagccctccttcatgctctcataatgctatactagtagctctcaaatgttagtgtacatcagaataactcgaagaacttgttaaaatgcaggttttggggcct

SEQ ID NO: 306 - DNA, 401 bp, Homo sapiens
tactagtagctctcaaatgttagtgtacatcagaataactcgaagaacttgttaaaatgcaggttttggggcctcattcccagttactgacttagtaggtctagcatgaagcccaggaatttccatttctattacattttcagtgatgttgatgctgctggcccagggaacacccttgagaactactggtctatatttacwcaaacataattctctcattgtgcttataatatgtgtggcaaattacttatttatgattccacttgccccactcactacatcagtcaataaggaaatttcagaaaaatataaagcaacacaaaaaacaattcagagtatactaattatctattgtgcaataaatgaccccaaaacttagttcaaaacaataaatatttatt

SEQ ID NO: 307 - DNA, 401 bp, Homo sapiens
tgcagatgtaattagtttagtgaggttggacgggtgtgggcccctaacccaatacaactggtgtccttataggaagaggagagcacacagagacacacacagggagagcaccatgtgaagacacagatggagacacatacaaagggagtgtcctgtgagagagaggcacaaatggagggatgcatctaaaagccaaggaaygtcaaagattgctggccattaccagaagctaagaagggtcaaagaaggatttccctataggtttcaggagtatgaccctgttgagtgcctgattctagactttccgtctccagaactgtgaagcaataaaatttctgttgttttaagccatctagtttgtagtatggtttacagatgccccagctaggaaacaagtatac

SEQ ID NO: 308 - DNA, 401 bp, Homo sapiens
gtaacttaatcctatcatgtaggtcaataattttcagctggggacaattttcccttctggaggatatttggtagtatctggggacagtttttattatcatgtgggaaagatgctattggtatctagtgtacaagggccagaaatgctactaaatcttctacaatacaaaggacacctccctacaataaagaataacctgayctgaaatatcaacagtgctgaggttgagaaacgttgatgtaagttaagaaatgcaagtgacttactgaaggctgtacagcaaattgatggcagatcaaccagaacttaggacatcaggacagtgaagaactgaacaaaggatgcactatggcgccaggtaatctggcttccagtttgatctgcttaccagaaagttcctg

SEQ ID NO: 309 - DNA, 401 bp, Homo sapiens
ttattactctcatagttaggttactaatcagttgactttgtgttaacctaaagagtgattatcaaggtgggcttgacataatcagtgagctttataagggactgggcccttcctggagttagatagatttgaaatgtgagaagctgcacttaagaggaagctgcatggcaaggaactgaagtagtctccagaaactgagawtagtccctggcttgcagggagccacaaaatgggaacctcattcctacagcttcaaggaactgaattcttccaacagctatgagagctacaagggactcttagctcgagaggagaccacatcccaggtgataccttgatttcgtccttgtggcacagtaagcagagaaactgggtagatctgcctggactcctgacctaca

SEQ ID NO: 310 - DNA, 401 bp, Homo sapiens
ggatggatggatggatggatggatggatggatggatggataaatggatcagtagatggatcaatgggtggatgaataagtgacaaattgaactggttttgtctgcccttttggccctttccttgagtctgtatcactcacccatcacttgaagccagtggtgggtgctagctcaactatggcatttgcccagggtctttgyacttgctatggaagagatatgctcttgtatgaattatttaccttcttcattctacttgccatttggattccagatcaaatatgttttcttcagaggttttttccctgatcacctcttactgttacctgcttagtcctgttttatcagtcaccctgctttactattttcagagctcttagcactctttgaatgatattatt

SEQ ID NO: 311 - DNA, 401 bp, Homo sapiens
tccattatgaaaaaggcatcagatgtgtgagtgaagccaccttggaaccctcagatcagcccacctgccagctgagtaccactgaatgcaagctgagtaccaccgagttaccttgcttgatgttccttggaacacaagaagaaagcagccaagctctgcctaaattctagaggcacacagtagagcatctgtggccactgyagttaaggtgaaaaggaaaaaggaatgaattctagatccatcttaaaatgtttatgcacacaatagagatatcttgaaatggttactttttaagtcactgagttttaaaaataatttgaatatagcaatagataactagaacactctttatcaaagtagggctaggttcaccagaaaaatcataagataatcttacctct

SEQ ID NO: 312 - DNA, 401 bp, Homo sapiens
cgacaaaaaaataccccgtggactatagaaggttttctatatgtctgatacataaaccaagttcaataaagccccttgggtccaattctggtttcttctcttggaccggtcattttgctcctcttagtttcagtctcctcatctttctctgaatcttttatacttgggattgatggaaaacttacagaaatgttctgaaaygcaaaaatgtcataatgacctagccatagctcacacatgaatcctcagtgtgaaccaggaatcaaccacttgtgaccacaaaagggaaaggaggaagaatacaagtctttccagctctttattgcccgtgcatcttggatatgttgagaaacctttactgactatcttcaagtcagtttattaatgctctaatatttttt

SEQ ID NO: 313 - DNA, 401 bp, Homo sapiens
tagctcactgtagtctcaaactcctgggcttatgtgatcctcccacctcaacctcccaagtaactaggactacagatgcatgccaccatacctggctaacttttaaagtttttggagagatgggggtctcactgtgtttcccaggctggtttcaaactcctggcctcaagtaattctcccactttgggctccctaaaaatrctgagattacaggcatgctcccagagtgctgagattacaggtgtgagccactgctcttggcccagggtagtttttagttatttttttattgtgatcaaatactgcattttaaaaattgttacttagatgtaagagaagagttaatatcctctctgtgtggttccttacatatacaaaagcaagcttatttaaattactca

SEQ ID NO: 314 - DNA, 401 bp, Homo sapiens
ttaagtatatcttttggaaatatctgtcaagtttttcaatcatattctgagacaggtgaaactgttttatcttgcatttctgaattgttcatcttgctgttacataataaggcactgattagatgctttaggttttgaattttttccttacccgattgaccaactctctaagtctcagtttctccatccataaaatagaartaataatgcctgcatgtagagttgtaaaaatatataatgagaaaaatattgtgaggtacccagcatagtagccaccacacagtagacaataacctattttacttatctaccttccaatccttaagctaactatctcttagtcccaagaataaaatctcaggattgggaaaaggcttcttcatttctgtttaggggcccca

SEQ ID NO: 315 - DNA, 401 bp, Homo sapiens
ttttgctccaataggtcaaggatatactagtatatcaggggtagctatggatcctgggatttcccctttaccacaaaggagatgatgtaggtgtgaaattccaggcaccttgcccatcttttgtaatccattcttctttttttctctctaccggttgcttcagattgtaactctacagcccacctggcttagagtgctgaygccttctcaaggcttcctcactaaacttcctagaagctattttccaaggagggtagaatcattgttctggaaaactaactaaactacgttcaatgcttatcaatatcagagaattcattttgggtgactcactcaagatattaactttcacattttaaattatatgcttttactcattaaatatacacaaagctttctct

SEQ ID NO: 316 - DNA, 401 bp, Homo sapiens
ccaagccaagtcaaaagtccactccgggtttaagagagtaagaagcagactataaattttggtgggcagagtatcatgtgcatagaggaaaataatcaattcatggcatcttgtttggagactatttactgtaacgtcttcccatcaatttgccaaataatacgaacttgcagcataacaccttacctctgacgaatgtcratcctcatgatataggagttaagaagaaattacttaggcagatagtgaggctacaggagtccttggtaaagttttccttttaatgaaaagcagcccccaaatcattttcttttctaacaaagagcagcctgtataattaagctgcagacatcgataagcaagctggaagcttgcacgggtgaatgccaccagttgtgccg

SEQ ID NO: 317 - DNA, 401 bp, Homo sapiens
ctgttctaagatacacctgggggttttatgttccctgaagaaaggaagtgaaacgtactgcatttcctatactacttaagcttcctttctcgatgtgaaaagaacaaacctatagttcctgaaatctctttacttcctgtgttgctaagtcagtaagaagagaattagcatgtactgagcacccaccgtatgctaattgcrttacctacatcctcatataaattatcatgctctatgagttatacttcttgagataagttctgtgataccatttgatagaataggacactgaggctaagattttgaggttactagcctaaaatcatataattaagaaacgttgggaacaggatttgagcccagatttggttgacctatgtcctataattctagccaacaaa

SEQ ID NO: 318 - DNA, 401 bp, Homo sapiens
gttgctaagtcagtaagaagagaattagcatgtactgagcacccaccgtatgctaattgcgttacctacatcctcatataaattatcatgctctatgagttatacttcttgagataagttctgtgataccatttgatagaataggacactgaggctaagattttgaggttactagcctaaaatcatataattaagaaacgwtgggaacaggatttgagcccagatttggttgacctatgtcctataattctagccaacaaagtatctctgccaagaattaaaaaaaaaaaaatcattatttcagggtctggagtgggacattttcagcagatcattttgttatcatacgaacgcagcctaaccacctgctactccaagtgagagtcaaaatccagcagcat

SEQ ID NO: 319 - DNA, 401 bp, Homo sapiens; identical to SEQ ID NO: 273

SEQ ID NO: 320 - DNA, 401 bp, Homo sapiens; identical to SEQ ID NO: 274

SEQ ID NO: 321 - DNA, 401 bp, Homo sapiens
gctaggaattttcatgtgtcagctcttgagttgggcactgaaaggagttattaatagaaaataataattcttgcaataactgtgctgtgtgttgttccatctattttaaatatggggaagctgaggctaagaggattaagtagcttgcctggtattacagaagagaaggaagcaagcatggaacccatatctcttgactcycagatgattctctctttaacaaactctctggttgccagtcttcagattagtagcctataatttgctttgacttcttcctccattcaggtcagctccctgcttgacatttctttctccactccatttctcagagacagctctttctgctttattcccacaaccactgcaccagctccatgctcatcattattgggtcaaca

SEQ ID NO: 322 - DNA, 401 bp, Homo sapiens; identical to SEQ ID NO: 276

SEQ ID NO: 323 - DNA, 401 bp, Homo sapiens; identical to SEQ ID NO: 3

SEQ ID NO: 324 - DNA, 401 bp, Homo sapiens; identical to SEQ ID NO: 278

SEQ ID NO: 325 - DNA, 401 bp, Homo sapiens; identical to SEQ ID NO: 279

SEQ ID NO: 326 - DNA, 401 bp, Homo sapiens; identical to SEQ ID NO: 280

SEQ ID NO: 327 - DNA, 401 bp, Homo sapiens
gacagtgaggtccaggctgatgaggtctcagatggaaatgaggaacttattgagaactgggggaaaggtcacccttgttatgccttagcaaagaatttggctgcattgtgtttatgctgtagagatatttggaagcctgaacttaagagtgatgacttaggatatgtgggagaagaaatttctaagcagcaaaacatttamgatgtgacccgactgcttctaacagcttatactcagatgcaggagcaaaaaaaaatgacttaaaggtgggatttatatttaaaaagaaagccaagtataaaactttggaaaatatgtagctttgcaatgtagtagaaaaggaaagctcattttcaggggaagaatctaagcaggcggcagagtgcccacttgctggagag

SEQ ID NO: 328 - DNA, 401 bp, Homo sapiens
atgcctttcaggcctttccttattgtcttggctattagcatttggctcccttttaatcatgctgatctctccagcaagtgggcactctgccgcctgcttagattcttcccctgaaaatgagctttccttttctactacattgcaaagctacatattttccaaagttttatacttggctttctttttaaatataaatcccasctttaagtcatttttttttgctcctgcatctgagtataagctgttagaagcagtcgggtcacatcttaaatgttttgctgcttagaaatttcttctcccacatatcctaagtcatcactcttaagttcaggcttccaaatatctctacagcataaacacaatgcagccaaattctttgctaaggcataacaagggtgacc

SEQ ID NO: 329 - DNA, 401 bp, Homo sapiens
tagaagttgccaagcctcttttacttttgtgtgctaaatacctgcaggtttaatacaacatggaagccaccaaggcttacagaatgtgctttccagagctgtgacctgaactgtacctggggccttttgagtgaggctggaactggagtggcctggatgcagagagcagtgtcctaaggctgtgcaggtcagtggggacckgggtctggcccatgaaatcattctttcctccttggtctctgagcctgtgatgagaggggttgccttgaagatctccaaaatgcctttcaggcctttccttattgtcttggctattagcatttggctcccttttaatcatgctgatctctccagcaagtgggcactctgccgcctgcttagattcttcccctgaaaatgag

SEQ ID NO: 330 - DNA, 401 bp, Homo sapiens
ctacaggctccacacaagtctgaaatccagcagggctgtcattaaatcttaaagtttcaagataatcgcctttgattctttgccctgaatgaggggtgggctcctaaggccttgggcagccccactcctgtggcttccctgggcgaagcccgtgttgctgctttcatgggttgtagttgaatgcctgtggcttttccaggytcaggatgtaagctgctagtgtatctaccattttaggggctgtaaggtagaggccccattcccacagcttcactaagcagttgtctcagtgaggacttgtgtggaggctccaatcccacatctttccttggcactaccctagcagaggctctctgtgggggctctgctcctgtacaggcttctgcctggccacccatgct

SEQ ID NO: 331 - DNA, 401 bp, Homo sapiens
tccttccacctatgagcctgtaaaatcaaaataaattatttacttccaagatacaatggagatacaggcactgattaaacatttccattttaaaagggagtcaaattggccgaaataaaggggctacaggctccacacaagtctgaaatccagcagggctgtcattaaatcttaaagtttcaagataatcgcctttgattmtttgccctgaatgaggggtgggctcctaaggccttgggcagccccactcctgtggcttccctgggcgaagcccgtgttgctgctttcatgggttgtagttgaatgcctgtggcttttccaggctcaggatgtaagctgctagtgtatctaccattttaggggctgtaaggtagaggccccattcccacagcttcactaag

SEQ ID NO: 332 - DNA, 401 bp, Homo sapiens; identical to SEQ ID NO: 281

SEQ ID NO: 333 - DNA, 401 bp, Homo sapiens; identical to SEQ ID NO: 282

SEQ ID NO: 334 - DNA, 401 bp, Homo sapiens; identical to SEQ ID NO: 283

SEQ ID NO: 335 - DNA, 401 bp, Homo sapiens; identical to SEQ ID NO: 284

SEQ ID NO: 336 - DNA, 401 bp, Homo sapiens; identical to SEQ ID NO: 285

SEQ ID NO: 337 - DNA, 401 bp, Homo sapiens; identical to SEQ ID NO: 288

SEQ ID NO: 338 - DNA, 401 bp, Homo sapiens; identical to SEQ ID NO: 289

SEQ ID NO: 339 - DNA, 401 bp, Homo sapiens; identical to SEQ ID NO: 290

SEQ ID NO: 340 - DNA, 401 bp, Homo sapiens; identical to SEQ ID NO: 291

SEQ ID NO: 341 - DNA, 401 bp, Homo sapiens
aggcagaagaattgcttgaacccgggaggtggaggttgcagtgagccgagattgtgccactgcactccagcctgggcgacagagcgagactccatctcaaaaaacaaacaaacaaaacaaacaaacaaacaaaaaaacccaaaagaaccttaaaaaaaaacccccgattgttttagggaatgaagaccattcttgtgtggyctttttatctagttaaatgcctattttccttaactattagtacagggtaaaataagggcggcttagcaaattaattatgattaacaaataaatacagggataattcactggacaattgttagaagaataattagaagttggatggaacagtggacggtgctacagactcagggtcagaaacatgaattacaattttagct

SEQ ID NO: 342 - DNA, 401 bp, Homo sapiens
aaggcaccagtagctttgggtcaagccctgcttcagattcgggccaaagacaacaagaatgccacaaagaacatcaaagggcagaatctggccctgaaacaagaagagggatggaggggaagtcatgatctgcagtaaaacaaataaataacctgtaaaatcacatctgcagacgctctaacgttcttaaatgctttccartaagctttgctggtagcatgccacaaagcctgtccaagaggatttacaacagatggaggcagggaatactgacctaggcctgattctgctactaaccaattgggtgaccttgggatcatcatttcacttcactgggctgtaagtttcttatttcaaagtaagaggactaaattagatgacttctgacctcccctctagcc

SEQ ID NO: 343 - DNA, 401 bp, Homo sapiens
tttaagttttatagcatttcttcctgggattacactctgagagcaggaatgcccatcagcaagggataagaaaagtcaagatataagtcttgggtgaaatagtcaatatatcccacctaaaattattttgcatattgtataatagtacatgtatatataccatatttggggaaactctgctttaaagcattctacaaatayatggaattacttacaattagctcttggaacaaactttattatccttacaattctcctccattcttccctggtaactatatcctggtgtctaggaactaaaaatgatcccatgggcacagttggctttgtgtttatatggtatctggggagccgctggaggattgggcgtggtaaaattataaacttattgaagttcaaac

SEQ ID NO: 344 - DNA, 401 bp, Homo sapiens
acacaaagccaactgtgcccatgggatcatttttagttcctagacaccaggatatagttaccagggaagaatggaggagaattgtaaggataataaagtttgttccaagagctaattgtaagtaattccatgtatttgtagaatgctttaaagcagagtttccccaaatatggtatatatacatgtactattatacaataygcaaaataattttaggtgggatatattgactatttcacccaagacttatatcttgacttttcttatcccttgctgatgggcattcctgctctcagagtgtaatcccaggaagaaatgctataaaacttaaaatgaggaagacacatattccattaccatgtttcctgaaagatctgtcacttccaaattgctggcttact

SEQ ID NO: 345 - DNA, 401 bp, Homo sapiens
gaagagcagacaggaatggatcttgggcttggggaccagtttttcattgtgttggctcaagacattggcatgaaatgagtggaatgagtaagggagaggaagatccaaggcagcaggttgactcactgaaagaagtgaactgcaatctgagaaggaaggttggagtagaacgggatggcggcttttgattgaatggtaggrtggggcactgaagctagaaagaggccgtgactgaaaaactagagccaggggtttcgagaaacatttagtttaaggacatcacataagggtcaaagctgaaaaattgggagagcttgaagagatataaagctgctttggggatgaggggatgcttggaaagttagggatgattaataggatttaggaaatggaaactgcca

SEQ ID NO: 346 - DNA, 401 bp, Homo sapiens
cattgctcatgaatgtgttcaggaagagcagacaggaatggatcttgggcttggggaccagtttttcattgtgttggctcaagacattggcatgaaatgagtggaatgagtaagggagaggaagatccaaggcagcaggttgactcactgaaagaagtgaactgcaatctgagaaggaaggttggagtagaacgggatggmggcttttgattgaatggtagggtggggcactgaagctagaaagaggccgtgactgaaaaactagagccaggggtttcgagaaacatttagtttaaggacatcacataagggtcaaagctgaaaaattgggagagcttgaagagatataaagctgctttggggatgaggggatgcttggaaagttagggatgattaatagg

SEQ ID NO: 347 - DNA, 401 bp, Homo sapiens
tagtcatccaaattttgaccacatccacgtatcactttcactgttatttagtatttagtaaatatacttttattaagtcattttacttcttttttgcttaaatacatttatttataaagggaaattaatggaaagaaaaaaaaaacacaggagcaaactatagaaacgatcatggcctaagagagaaagcattgctcatgratgtgttcaggaagagcagacaggaatggatcttgggcttggggaccagtttttcattgtgttggctcaagacattggcatgaaatgagtggaatgagtaagggagaggaagatccaaggcagcaggttgactcactgaaagaagtgaactgcaatctgagaaggaaggttggagtagaacgggatggcggcttttgatt

SEQ ID NO: 348 - DNA, 401 bp, Homo sapiens
tctacgacagtcttcattaagctgtcattcatttagtcatccaaattttgaccacatccacgtatcactttcactgttatttagtatttagtaaatatacttttattaagtcattttacttcttttttgcttaaatacatttatttataaagggaaattaatggaaagaaaaaaaaaacacaggagcaaactatagaaacratcatggcctaagagagaaagcattgctcatgaatgtgttcaggaagagcagacaggaatggatcttgggcttggggaccagtttttcattgtgttggctcaagacattggcatgaaatgagtggaatgagtaagggagaggaagatccaaggcagcaggttgactcactgaaagaagtgaactgcaatctgagaaggaa

SEQ ID NO: 349 - DNA, 401 bp, Homo sapiens
tatttacatttcagtgatttgctatcttttccttggctatagatcatactgcttattaatttgacacatgttcaaactatctgagatgaatatttatatatattttatgcatatttactcccgggaggtaccctttcctggagtctatgcctggcatctatatcttcaactaagaagaaattgtatttaaggacatgtgcrtggagagtgtcactggatttggagtcagcaggctctcattttagtcctgcatctaccagctgcttgctgcatggtattagaaattcatacaaactctgagttttagctttcttgtctgaacagtggattaattattcccatccttcttgccgttacaggatagccaaaaacagattttaaaaacaaagagaatattctgt

SEQ ID NO: 350 - DNA, 401 bp, Homo sapiens
taggcctattgccagcatcactcagcaggtaggcgaaggggctgggatttaacctgggttcttttgactttattcaggaactgcattttttatcttttggcaacatatccttttaaacatctactatttgaatttgtaggagtcttattttcctggagttacgtttgtgttccatatttctgccacattctttaatggaamcttatttacatttcagtgatttgctatcttttccttggctatagatcatactgcttattaatttgacacatgttcaaactatctgagatgaatatttatatatattttatgcatatttactcccgggaggtaccctttcctggagtctatgcctggcatctatatcttcaactaagaagaaattgtatttaaggacatgt

SEQ ID NO: 351 - DNA, 401 bp, Homo sapiens
ttattgtcactttcttaaaggtaaagaaacacagatattaggcctattgccagcatcactcagcaggtaggcgaaggggctgggatttaacctgggttcttttgactttattcaggaactgcattttttatcttttggcaacatatccttttaaacatctactatttgaatttgtaggagtcttattttcctggagttacrtttgtgttccatatttctgccacattctttaatggaaccttatttacatttcagtgatttgctatcttttccttggctatagatcatactgcttattaatttgacacatgttcaaactatctgagatgaatatttatatatattttatgcatatttactcccgggaggtaccctttcctggagtctatgcctggcatcta

SEQ ID NO: 352 - DNA, 401 bp, Homo sapiens
gagtaaaagcatagattcaagccgccatgtctaactgggcattttctgtgctactattcttaagagaattatctcactcaatcctcactgcagctctaggagctagatactgttattgtcactttcttaaaggtaaagaaacacagatattaggcctattgccagcatcactcagcaggtaggcgaaggggctgggatttwacctgggttcttttgactttattcaggaactgcattttttatcttttggcaacatatccttttaaacatctactatttgaatttgtaggagtcttattttcctggagttacgtttgtgttccatatttctgccacattctttaatggaaccttatttacatttcagtgatttgctatcttttccttggctatagatcata

SEQ ID NO: 353 - DNA, 401 bp, Homo sapiens
tttccaatcctctttgttcttgtaagtttatatcatttcttcattcctttacaatcattttattggtttgcataaaagaacggagtaaaagcatagattcaagccgccatgtctaactgggcattttctgtgctactattcttaagagaattatctcactcaatcctcactgcagctctaggagctagatactgttattgycactttcttaaaggtaaagaaacacagatattaggcctattgccagcatcactcagcaggtaggcgaaggggctgggatttaacctgggttcttttgactttattcaggaactgcattttttatcttttggcaacatatccttttaaacatctactatttgaatttgtaggagtcttattttcctggagttacgtttgtg

SEQ ID NO: 354 - DNA, 401 bp, Homo sapiens
gcacagaaaatgcccagttagacatggcggcttgaatctatgcttttactccgttcttttatgcaaaccaataaaatgattgtaaaggaatgaagaaatgatataaacttacaagaacaaagaggattggaaaggtaatgacatcagttgtgagatgtcaactaaattgttaactatgggaaacaaaaggatagaggtagmcaactgatgagagcagagcaagctgaaaactaagtccatattagggatgtcaaaatctagttaacatcagaagacccagaaaagataatggctcattggcatccagtgtatttgaaaggggagaaaaatgagagggttgattgacaatatgtgtaaggaagagttagaaccacagattcactgtctagtcctaatagcca

SEQ ID NO: 355 - DNA, 401 bp, Homo sapiens
ctttctccagtattgtctatctcatcaacttttattttttcaaatttctgaagagttcttcaacgcagtattccaattatcctccctttttcttgacactttaatatttgctttcacaacaattccaaggatatttttattttgtaaatgcttaccttgttctctgttttatatattcaagattttcctcaattattttaygatttttggcactccactaataactagaatggagcactggaaagttaattagaggtgctgtgtatgtgactgaggctgtcaactggttgacctcaccatagagtgatgagaagaggatctgccattttattgtgatagtatctgcatgtttgttttcctcctgagacggatagtctccatggagaagaattctccagtgt

SEQ ID NO: 356 - DNA, 401 bp, Homo sapiens
agaggagagttttataaatggactctatgcaaaggtttggagacatacacatgggagtgttcagtaccccaaaggttagcaatagcagtgaactgtcagtacccctagggaaaaatctcctgttttctagatctctttcccagctgacttactttgatggtatatgattcccaacagctttctgagtaaggctgtctgatrgacaacagttttgggaaacttgagtgtctaaaaatgtctttgttatctcctcacacattggactaagggtataggattctaggttggaaaccatttttgctcaggtgtttgaaaatattattccattgtcttctagtttttgatgttgctattaagcccaatgtcattgtaacctttcatgctttaaaggcaatttttta

SEQ ID NO: 357 - DNA, 401 bp, Homo sapiens
ccccaatctgcttagttgtgttagactttgttaaatatgcatttattatgcatatcaagtatatatcagtcatgcagcagacagatacaaaacttacactgggtaacagaggagagttttataaatggactctatgcaaaggtttggagacatacacatgggagtgttcagtaccccaaaggttagcaatagcagtgaacygtcagtacccctagggaaaaatctcctgttttctagatctctttcccagctgacttactttgatggtatatgattcccaacagctttctgagtaaggctgtctgatagacaacagttttgggaaacttgagtgtctaaaaatgtctttgttatctcctcacacattggactaagggtataggattctaggttggaaacca

SEQ ID NO: 358 - DNA, 401 bp, Homo sapiens
ggggatcatgaaaaactgaactcattgacaatcccccaatctgcttagttgtgttagactttgttaaatatgcatttattatgcatatcaagtatatatcagtcatgcagcagacagatacaaaacttacactgggtaacagaggagagttttataaatggactctatgcaaaggtttggagacatacacatgggagtgtkcagtaccccaaaggttagcaatagcagtgaactgtcagtacccctagggaaaaatctcctgttttctagatctctttcccagctgacttactttgatggtatatgattcccaacagctttctgagtaaggctgtctgatagacaacagttttgggaaacttgagtgtctaaaaatgtctttgttatctcctcacacattg

SEQ ID NO: 359 - DNA, 401 bp, Homo sapiens
tctggatctacagattagagacaaatgaagtcagagactcaaagcataagagatattcaacatgatagagactctccactgctggctaagacagagggagccatgtggcaacaaatagagtgtattttagtggccaagaatggcagcttcagatggcagccagcaaggaaatgggagcctctgtcctacagcaacaaggamctgagttctgccaacaaactaaatgagctggggagaggatccctcgttccagatgagatgagcttgagtttggtaaacattatgatttcgagcttgtgagtccctaaacacagagcctagctaggccatgctcagactgctgactcatgtaaactgtaaactaacaaataggtgtaattttaaactgctaactttgtgtg

SEQ ID NO: 360 - DNA, 401 bp, Homo sapiens
acctagatcctgggtgttggagccaggcaacatggcttgctaaaggcaatgtacagtaggcaggatttgaagacaactgctaataacctatacccttttattatcccctcctgttaagtgtgaaatgacctgttaatatgatgatatgtggcaaaagggattttatagaggtaattgggggccctaatcagttgagtgcaytgaaagggagattatgcaggtgggcctgacccaattacatgagctctttaaatctggatctacagattagagacaaatgaagtcagagactcaaagcataagagatattcaacatgatagagactctccactgctggctaagacagagggagccatgtggcaacaaatagagtgtattttagtggccaagaatggcagct

SEQ ID NO: 361 - DNA, 401 bp, Homo sapiens
acttagttgcaatgtgactccacgcatgtcctggccaattcagtaacctctacacaatgcagcaagatggcactggcagtatggcacctagatcctgggtgttggagccaggcaacatggcttgctaaaggcaatgtacagtaggcaggatttgaagacaactgctaataacctatacccttttattatcccctcctgttragtgtgaaatgacctgttaatatgatgatatgtggcaaaagggattttatagaggtaattgggggccctaatcagttgagtgcactgaaagggagattatgcaggtgggcctgacccaattacatgagctctttaaatctggatctacagattagagacaaatgaagtcagagactcaaagcataagagatattcaacat

SEQ ID NO: 362 - DNA, 401 bp, Homo sapiens
cctttcttgatacaccatacctgtggttcccagaatatgcagcttgttgtagacttgtctgcccttgcgtgtgcctccctgctgtactcctctcacttctccattcccatcgttctggtgacttctcagcctcaatattgctgcttctgtaaagactttcttgaattccattcctccagctccagcagcttaccttccccrggcattgcctcctttgtgcatgactgtacatcagcatttaccacatttctataagtgacttctactggccttcaaactcatctcatgccatgctctccactcaatccataccggcctccttcatttctctaatgcgccaagttcttcatggcctcagatcgcctacacatgctgcttccctggactggacagttcttccc

SEQ ID NO: 363 - DNA, 401 bp, Homo sapiens
tgaattccattcctccagctccagcagcttaccttccccaggcattgcctcctttgtgcatgactgtacatcagcatttaccacatttctataagtgacttctactggccttcaaactcatctcatgccatgctctccactcaatccataccggcctccttcatttctctaatgcgccaagttcttcatggcctcagatcrcctacacatgctgcttccctggactggacagttcttcccccgcattgcacttactctaactcacctttcaggtctcagcttgaatgtcacttcttcagaaagtccttcagtgactacctagtcttatgcaagtccccactgttatagcttccatgacaccttttgcttaattcacagtacttaccacgattttaattcat

SEQ ID NO: 364 - DNA, 401 bp, Homo sapiens
cctggactggacagttcttcccccgcattgcacttactctaactcacctttcaggtctcagcttgaatgtcacttcttcagaaagtccttcagtgactacctagtcttatgcaagtccccactgttatagcttccatgacaccttttgcttaattcacagtacttaccacgattttaattcatttttgtgtttttcattcrtctatttattccacgaatatttattaagcacatatcatgtgccatgcacaactctaaaggtgggatattgtggagcaactatcttctcagctatgaggagagatagataatgaacatatacagagataaataaattaaataattttaagcaatgataaatgtaattgagaggataatatagggtgatatttctgagagta

SEQ ID NO: 365 - DNA, 401 bp, Homo sapiens
tatcttctcagctatgaggagagatagataatgaacatatacagagataaataaattaaataattttaagcaatgataaatgtaattgagaggataatatagggtgatatttctgagagtaaccaggaagaggatactattttagttcagagaagaagtgagccaggcagaaatgaggggagctattccaagtagacaatrtcatgagcaaagcccagggataggaatgagtttgaaatgttcaagggacaaaagaaagttcagtgtttatggacaatggtgaatgagcagggacagaagggagagtgaggacatcgaagtcagcagtcgagatcaagtcatgtcaggtcatacagatcatgatcataagtctggattttattctgggaacagtgagagct

SEQ ID NO: 366 - DNA, 401 bp, Homo sapiens
gaggatactattttagttcagagaagaagtgagccaggcagaaatgaggggagctattccaagtagacaatatcatgagcaaagcccagggataggaatgagtttgaaatgttcaagggacaaaagaaagttcagtgtttatggacaatggtgaatgagcagggacagaagggagagtgaggacatcgaagtcagcagtcragatcaagtcatgtcaggtcatacagatcatgatcataagtctggattttattctgggaacagtgagagctctggcagatttaaaggagggggatagcttacactttagaaaaattactctgactgcaagtaaagactggactattaaaagtgagttcaggcaatccagatatgaagctatttcaggagctcaggcaagg

SEQ ID NO: 367 - DNA, 401 bp, Homo sapiens
aggaatgagtttgaaatgttcaagggacaaaagaaagttcagtgtttatggacaatggtgaatgagcagggacagaagggagagtgaggacatcgaagtcagcagtcgagatcaagtcatgtcaggtcatacagatcatgatcataagtctggattttattctgggaacagtgagagctctggcagatttaaaggaggggsatagcttacactttagaaaaattactctgactgcaagtaaagactggactattaaaagtgagttcaggcaatccagatatgaagctatttcaggagctcaggcaaggagagacagtgtcttggactgtcacagcagtgagatggtgaaaagtggttggatttgggatctattggagacataattgataagatttattgat

SEQ ID NO: 368 - DNA, 401 bp, Homo sapiens
tattgatgcagtgtccaaggtggagaaaggtcagagtggatccagaggagccaagagaagacgtccagcatggtgacctgggctcaagtcaaggtccttatttctctggtaagagcaaggatactaaaacatgtttgagtgctgatgaaattgatcccatagagagaaaaatgttgagagtactggggaaaagggggatarttgtaagaatgaggtattttaaagtgttagaagaatgagatccaaagagcaagaactggcttgtcttagagaggagtagagacagatcttcaattatcatgggaaggaatgtacagatggagctaggggcatagaatcagtggagggaattgaagataatgtctatttcatctaatttttcagtaaagtatgaaaataaa

SEQ ID NO: 369 - DNA, 401 bp, Homo sapiens
tctcagaaaatggaaaagtaaatctgctatagaaatgttagattaactgatatctgagttagattatctggtaaccaagtgcacgtgcaaagtgagtcctgcgagtaatattgtgatatttcaacttctcaggagcaagctcagactaagtgattgtttggatttatccagtatttatctagtcaagaatggcaaaaggaragaaaggaaagaaagataagtggtttttcaaggcactgatcttaatgatgggtcataaattataagctggaaggtgagagaagtgaagatgagaagggaaacatacatacagacaaagctgtagaagggtgagtggatttgagataatgatgtcagtctccagagggaagatgccagaatgaataagctactaggacaga

SEQ ID NO: 370 - DNA, 401 bp, Homo sapiens
aggtggcagaggtgggtggaggaagaaatggtcagagctactaggccaaagagctaaagggccagagtcatagagattccaccttcatgaatgctgaatttgccaagaatgatatcggacagagaggagaagaggaagaagtaagccagacattcaagttatcagtcagttaataacaacaaaataattacagacacttayatggcacttaaaatataccaaacaccattcagtgtacttcacgtgtattacctcatttaatcttcacctctaccctatcctcattctaaagatgaataacctgggtcccaaagtattaattaatcttttttactgtcataactagtaaatggcagagactgaatccaacctaggcaatctgattccagggtctatgacct

SEQ ID NO: 371 - DNA, 401 bp, Homo sapiens
aaaaataataaaatatgtaagtaaagtcaacactttcctctatgccaagttcttctgggtaatgaagtctaatgatgggcttcaaaaatgctaggatttttggagtagggaaagacaacagagagaaaggagttagcttcctcacccccaggcctcaagttatctgaggtgtgagagatgaaacaaacagtcaccaatcamaggggaagctgctttatcagggaacagaaagtcttcatttacatcaaggaggtgataggaccaagaaactgtggaacatatgggggtttattcatgtcttattgtgaattccagtgtgcagagaaagatggggatagattcagatttgattcactgtcaattccaggggtggggaacaggagtttagaagggcagaaaga

SEQ ID NO: 372 - DNA, 401 bp, Homo sapiens
ggggagggagctttacctgaatacactgagacctgaggggcttgccattgctgagatacactgacaactggcaatatgcaataaggtaagaccctcagggcaatttatctggtccataaacatattttattggtctttacacccccggaacccagcaaggttcccagcacacagttggtgcctgtactctttacacaggtrgcaatgtcaacctctctcatttcaacttgaattaatatcctccatgctcacccaacttgccacactgggcttggttgtgttcccaaacctaccaagctccttctcatctgagagtttatgtagttattaacccatctacctggacaccaccactcctactcagccagttccttatatgcttggctctttcttaatcactc

SEQ ID NO: 373 - DNA, 401 bp, Homo sapiens
ggaaaaccaaggagaacccgtgcaaagtgttgtcatgggattaagctattgagataagccctttccagctcgaatagaatgtattagtttgaaagcaaagtgggctttgtctctgccacttggtccatttgatttttattttctggtcaacttgacctttgagtcttactcaagtgatttttgacctagttgtggcatagkgcctgaagctatataaaacagtaacttatttgattacattgctcagccactataagattccttcatgtttttccctatttttgaaaacgttttctcacctcagctaaacaaaaccggtcttttcagtttatggctacaaacaacagctcgtattgttttagtaccttccacagttaagaaatgaatttagcaatcatcca

SEQ ID NO: 374 - DNA, 401 bp, Homo sapiens
aacaaacaagactatttcctttgactgaacctcagtttcctcatctataatatggggaaaagttcatgaattccgtaaacatttataatggagaagcactatcctggaatctagggatgtagatacaataaaataaaaaaaaaagacacgtggaatttactcttttgataaattggtaactatgaatctcatcaaaagaargcagaacgcagatattctgagtagggggtttgggggagaaataagagtgattcctcctatctgctgctagggccataaagacactacaccaagaggaagtgtaggcttggccaggtccctgttccaggccctgttgaaaaggctgttagctctctctccttcacaccttcagactctatacacagacaatattctctgtg

SEQ ID NO: 375 - DNA, 401 bp, Homo sapiens; identical to SEQ ID NO: 295

SEQ ID NO: 376 - DNA, 401 bp, Homo sapiens
attgcctaaagcatcattttccaatggaattgtctgtgatgatgaaaatgttctacacattgtccaacacagtagccattagccacatgcagccactgagcccttgaaatgtagttcacatgactaaagaactgaatttttaatttcattcaatgttaattaattctgatttaaattttaatggccacatgtagtgagtaracaaagcagtggcagacactttaacatgtctttttcatattgtattcaaaatacttttcactgttgaagtgcaatgaaagaaatgtgttgactttcttcatattgcgttcttatttacatagtcaattataaattaaacgatttccttgttttcttgctatcacctggttgctttccagcattaactgtaatgttaaaag

SEQ ID NO: 377 - DNA, 401 bp, Homo sapiens
aatgtagttcacatgactaaagaactgaatttttaatttcattcaatgttaattaattctgatttaaattttaatggccacatgtagtgagtagacaaagcagtggcagacactttaacatgtctttttcatattgtattcaaaatacttttcactgttgaagtgcaatgaaagaaatgtgttgactttcttcatattgcrttcttatttacatagtcaattataaattaaacgatttccttgttttcttgctatcacctggttgctttccagcattaactgtaatgttaaaaggagggacttacccagaaataacactgaatgcaacctaaagcagcaagaatcttcatgggaacagaataaacacaaaggatgtctacccttcctccctccacccactt

SEQ ID NO: 378 - DNA, 401 bp, Homo sapiens
agcctcctctctctttcagtcttcttggtcagtggtcttccaagtgttgtcctcaggcccacagcagcagcagcacccagggagttgttagaaaggcaaagtcctggtccccaccccagacccagtgaatcagaaactctgtgggtgaagtatatagcaatctgtgtttataagccctctgggtgattctggtgcccactraagtttgagaaccattattctaaaatgttcagactgctatatacatggacttgagatgaataagtgttcctttactacttttaaagtcagtattttgattacttgaaaaggtaacaaagaggtctgttttttctctttgaaacatggtagtaaagttatgtcagttaatatatgtacatattactttcttattgctgctg

SEQ ID NO: 379 - DNA, 401 bp, Homo sapiens
tagggcaacgcttgagaaaaattcaagagacaagaggaatcagtcatgtcaatatctgaggcgtgagcattgcaacagcaaatgcaaatgtttaaggtattctggtgtttgatgaacaaaacaaaagccaataaataaaagtggcaaacagtgacagctgaagctggggttgggtgtggtttgcagctcacagaggatttstaagcctttattgggttttcagcttctactctgagcaaattgcaaagctgctgtgggaggatgcagagttactgatctaactcacattctccaacctgactgtagctgctaagtggaaactaggctgaaagttggggatggtggagcaaggggaatcaggtagaaggccattgtagtaatccaaacaaggtagtgacagc

SEQ ID NO: 380 - DNA, 401 bp, Homo sapiens
tcatgccaacccaacattgcaggcaagatggcagaagcaagggtagaaacaaaactctgcctgtctcaaagtcctctgcatcacacttagcagctccatgatctggggcaattatcacttttaagaaggatttggcatgtgctaggcacagtgctaaaccttcttacattaatttttcgatttaatcctcaaaacaacttsatctggaaagcgttgtttatctacattttcagacaaggaaagtgaggcacagaaaggatgagttgcgtacagttgcacggtgaggaggtagcagagctcagatggggaagtactaatgtgtctttatgactccagagcccaaacgcctcgcccttacattagaaccctcaaacttattcagctggaattgcctcatctat

SEQ ID NO: 381 - DNA, 401 bp, Homo sapiens
gggtgaaagcagactttacagggtactggatgccgtaatagagctgtgagcactaaactggaatgtgccaaacacaagagagaatcgtggtgcccttcctggtagaggaaaaaaaaaaaaaaaacacgtgcaagggcagaggaaggaaaccatctggcataggatgccacttcttatcttaaatgagaaatccatgacctmcagccatcaaagcttcattcattcacaagtcctctctggatccatccactgcgaaaaggagcccaaagataatgaatttgtaaaattttcattttcaacccttaattacatggaatatattgagcttctagcatatagcttggcatatagtaggtgctcaataaataatattaaatttatattaatataaagggaaaata

SEQ ID NO: 382 - DNA, 401 bp, Homo sapiens
gagcccaaagataatgaatttgtaaaattttcattttcaacccttaattacatggaatatattgagcttctagcatatagcttggcatatagtaggtgctcaataaataatattaaatttatattaatataaagggaaaatagggaactacaaaaacgtttttgtcagtagcaattttcttgaggtattctttcttaatcmgtcatactctcttgatatgaaatttaattccattcaacaagcatttgccgagtgtcagctgtgtttcaggcactcaggaagacaggcagagctgcctctcagctggtgcgcaccagaatgttctaggaggcttccatcttggttggctggagagcatgattgccagttgtgaatgatgaatatctccctgagtccagaga

SEQ ID NO: 383 - DNA, 401 bp, Homo sapiens
tgactgattctaactgaaagagtcttactggctgacaacagggctgctccatgaagaatgaaattttatagagaaaacagaagaggagtgggtggacgcacaggaaacagcaagagcccagaagagtaaaattgttcagaatgtcagggaaaggcaagcagctcagcagagtagaaacaacactgaagctgtgatgggagygtgtaagagctgaggcaggaagggggtggtgggtccttggatggcatgagaagaatttgaactcttattctcctaaaagtaacagacagtcatcaaaggaatttgtttgaagagtgtcatggtcagatctgcctttccaaagatcactctcggtatcccagagaagataggaagttgagctgtgaaaggaactccactgg

SEQ ID NO: 384 - DNA, 401 bp, Homo sapiens
ttagccaatctgaaatcaccaactaacctccaactagagacttcccactagattgtacctaaacaaggcaaaaggcctatctgtaaccaatcaagcaatttctttactttgctttcatgtgcactctacagaagcccgctgctcatgctgctgaagcagagttctctgaaccttttccaagtggagttctgcctgattcaygctcaaataaactttgttaaattaattttgtctaaattttttaaacaacatatataggactagaatgaaatgtccatcacctagcatagcaccaagctcatttcagggattttagaacggctttaaaaaaaaagaataaataaataaaagctttattgaagtataattgatatacaaagacctgcacatatttaatgagt

SEQ ID NO: 385 - DNA, 401 bp, Homo sapiens
aatgagatagatgcaaaatggactagtcctttcttggtaagacaacacattttttttcctatttataggtttctgtctataaataaagtaaatcctccagtacttgccttgaaaaattgtcttacattcacaagaaaatatttcagattatttgatgagtaagtctttttttttttactttactcaaaatctcaactggcytcaagttcatgactggagtagtgaggttacttatgtcttttgaaagtagtgggcattccttagaataccaaagatttaatatattaacaataccaaaacccaggatttgagcccagatctgttttagctccaaaactcccaagctgagtcaatctcaacaccatccaatgctctgccttttagagaacaacagatagctc

SEQ ID NO: 386 - DNA, 401 bp, Homo sapiens
tgattttctctcccaaaaagtaacagaactgaagcaggtaatcaatatgatgcacgttagtagggaaaaaaaagtacttggagaggagtccgctgacccacggtccagtttggcttcttctcctttctacctcgaagccattcacaaattccttattctctctgggatctttatattgcaagggattggcttatttgactycaaacttccttctgtctcaacaaccctatagcccaatgtttagtgtggagcaaacctaagttcaaatcctttaacaagttactgtattccctctgagttccagttttcccaggtatcatgtagggataaatagccccactacacagaattgtcatgaagattaaacaatagaaaatacagtaatttctagtgcataataa

SEQ ID NO: 387 - DNA, 401 bp, Homo sapiens
aaaaaagtaaataaaaataaatgtcagatattactcttctgtgttaaagacagacagctcagttggtgctacaaaattccagtgtctatgttaattattatatcacagagcactgttttaagtggctgagtggccatggggttttcaattggatccacttccatcatgatctcatctctctcggccagtttcttaaagggmgttgcagcagccatttatttatgaggttctgcactttggatggagatgcatatgtaatggggagagactgcacatttgacaaatgggaatcatgattgtctgacctactgacagttgttgatgtgctctcgtgacctgtaaatgttgcagctgactgattacagtaattgattgagaaaacatttgtcaatagccttcta

SEQ ID NO: 388 - DNA, 401 bp, Homo sapiens
tacaaaattccagtgtctatgttaattattatatcacagagcactgttttaagtggctgagtggccatggggttttcaattggatccacttccatcatgatctcatctctctcggccagtttcttaaagggcgttgcagcagccatttatttatgaggttctgcactttggatggagatgcatatgtaatggggagagacygcacatttgacaaatgggaatcatgattgtctgacctactgacagttgttgatgtgctctcgtgacctgtaaatgttgcagctgactgattacagtaattgattgagaaaacatttgtcaatagccttctaatgacagagagcagggaggaagagattgctggagcacctaggagctgggttttgcttaacagaaggagc

SEQ ID NO: 389 - DNA, 401 bp, Homo sapiens
tcagaaaaatcattatttggcagcactgggccagaatttctgcagggcaattgttgtcctgacttgggtggctggtggaaatgggcgtgtactcctaagtttgtcccaattgctaccgctctattacttcatcctttaatgttcactctcttggccctgtgggatttttgaggctgagattcctattttaggttctgaagrcaaacacacacacagaaaagaatgatttcaggcccttccttgagcatactcatgatgctataactttttatgacagtaaatagtaagtatctagcaaataaggaaaaataggctttcttgtttattaaagactgcacagtgaagtcagcccacatctatcgatatggctgccatatgcaacaaactattttaaaacccgt

SEQ ID NO: 390 - DNA, 401 bp, Homo sapiens
taggttctgaagacaaacacacacacagaaaagaatgatttcaggcccttccttgagcatactcatgatgctataactttttatgacagtaaatagtaagtatctagcaaataaggaaaaataggctttcttgtttattaaagactgcacagtgaagtcagcccacatctatcgatatggctgccatatgcaacaaactaytttaaaacccgttacaataccctgactttggtggtagctggaattgtagataaaggaagactgcatttgtaagtagtggacttgggcagggttttcagtagtgtcacctgattgctggtgacctataatgagtccttcacttccttggaaatcttattcctccagagccaacagagtaggaggttgaaaagtgttctata

SEQ ID NO: 391 - DNA, 401 bp, Homo sapiens
caacagagtaggaggttgaaaagtgttctataaactataatgctctataccaggggcagtgatctatggccactagtttttgcaaataaagttttattggaatacagctacacccattcagaatataaactccagagcagttattttcaaagtatagtcaccaggccacttggttcataaatgcctgggccttgctactaytacagattctaaggctccactgcagacttcctgaaacagaatcttacggtgggagaagaatgccagactctgttttaacaagaaccccagattattttgatgagtcctaaaatttgagagcttctaccctagggatagccccctctttctgtactatttggcacatacaaatttggaaggagacaggaaattcgtgtcca

SEQ ID NO: 392 - DNA, 401 bp, Homo sapiens
ggtggaccaggggaaaggaaggtcttattcttgaatatagataggagttttcattcatgtattaaactgaatattttgatttatgattggagattaggcattcaagacttgtaaaagtgatccaaaaagccttggaacaacctgaattttcacccagtggcaggggaaagattatcctcactagtaggtttaaaagggcartcagggacaaaaataaataaaactagttgtatgactaagccctatgaattctgtgtgttcagagttctcattacacatatgccctcatccattaaaagaggacccgtaagagaggaactaaagttacactgggctaacacccacatatgtaatgaatggcaggcgggagtccatctggactaaattagtcaaagtgtggg

SEQ ID NO: 393 - DNA, 401 bp, Homo sapiens
caggttgttccaaggctttttggatcacttttacaagtcttgaatgcctaatctccaatcataaatcaaaatattcagtttaatacatgaatgaaaactcctatctatattcaagaataagaccttcctttcccctggtccacccaaactgctagagcctgtggtaggcaggtagcccgccttggggaagaatcatgtctyacgttctcacgtgcgactttctccactgactaattactgtttctgatcctcattttcattcagatcagggtggacgaggggagaaaaagaggtaagggaaataagaaagtccttactttcttatttgttgtactgctgtgaatcagctctgctctctctgggcctaacgggtgaaccctatagactgaacacttttcagc

SEQ ID NO: 394 - DNA, 401 bp, Homo sapiens
taatacatgaatgaaaactcctatctatattcaagaataagaccttcctttcccctggtccacccaaactgctagagcctgtggtaggcaggtagcccgccttggggaagaatcatgtctcacgttctcacgtgcgactttctccactgactaattactgtttctgatcctcattttcattcagatcagggtggacgaggkgagaaaaagaggtaagggaaataagaaagtccttactttcttatttgttgtactgctgtgaatcagctctgctctctctgggcctaacgggtgaaccctatagactgaacacttttcagcaggccagcctcaaaatgagctaaatgtttttgctgaactcatcaacaaaatgagctacgtgcctttgttaagctcaccta

SEQ ID NO: 395 - DNA, 401 bp, Homo sapiens
ataaagttctctacctacccaacatgtcccttgacgcacacatccagggagtcccatgggtagaaggcaaaggagcttgaggctagctcgctgtctctcctgtgtgcccacatctggtccagaggacactcaaacatcctattcactcaatgcatttgctgtgtgccaggagaaggggtcacctctttctcatgtggccascaagcagctccccaacctttctctcttgctcagtagagtcccctgaagggtgtcagacatcaatccactactcactcccaaatcctagatacacacattatgttctctgaatggtctcacagaagcacctctcccacttggcttgaagtgagggacagacatccccagacacatccttagagaaggactcaaagcctgtc

SEQ ID NO: 396 - DNA, 401 bp, Homo sapiens
tgttggagaaagagcacccgggagagacagaagggcaaagatagtcttggtgtgagaagcaagatttgcctcctggctacaaggaaaagctctctttgtctttcttagtcccaagaacaacctgccctttgtgatcaaacctgccagcaatttctgcctgaaggactggaaaagcctgtcatctcagcagacaaaggaggyctccagccccagaggcagtgcagtcaatgaaggggaagaggacagttacctttccttccactcaccttgatggcctcctgttacaggtgcctccctgccatttcagagatgcatgccatcctgccatctgctctcagagtgttagaattcaaggaattctgtgcttatcttgttgtccacacaccgaatccttagcccag

SEQ ID NO: 397 - DNA, 401 bp, Homo sapiens
tctttgagatcttgggctggtttctctagctcactggtttcagtttcttcttcaaaaatcaagctggagatgaagacagaaggatggaatgatctctgaagtctcttccagctttttcaagattccaggttgcatattctccaagattggaaaggttctggctcattaaatttgacaaatataaggcatagtcttggcttyactcaactaattggtacttttttccctcaaactcttgctcctgagttgattaaacataattgaaactcatacaataaaaaatgtgggtgtggtaatgggaatgtattgaagctaaattatctagactttctgattgcactaattaaaaagcatgaaaggtttcttcaactggaagatcagttccttgaagttagaaatga

SEQ ID NO: 398 - DNA, 401 bp, Homo sapiens
tctttggttagcagtgagaacaaacacttttacactgcatcttattgtctaacactctgatgcatgtaaaaactattggcctctgcttcctcagacctaggttatctctgacaatgaaccttttgctagcaatccacaccttcaacaagaataagcaatgtgtctgccagactcctcttcacatatctgcccttctagagrgatatttaggagctcaagtagctgtgggtggtggagttgtctatgcacttcgacttcgttctttctgtaacccaggcttttatggaccacagggacaggaaagaacagctcatatcattagcagatgcttcattggctgggggataagagtagggaggtaatcactcaaactctttctgcaatgctgactacaggatgtt

SEQ ID NO: 399 - DNA, 401 bp, Homo sapiens
ccacagctacttgagctcctaaatatctctctagaagggcagatatgtgaagaggagtctggcagacacattgcttattcttgttgaaggtgtggattgctagcaaaaggttcattgtcagagataacctaggtctgaggaagcagaggccaatagtttttacatgcatcagagtgttagacaataagatgcagtgtaaargtgtttgttctcactgctaaccaaagacaggcaaattaagactattaaagtatccttttctacccactaaaataattttagagaaaatttaagattacaaagctcagcgttagtaagactgcagggaaaaagaaacacgcacacattggaaaaatcatttcggagaccaaattagtaaaataaataaagagccaatataa

SEQ ID NO: 400 - DNA, 401 bp, Homo sapiens; identical to SEQ ID NO: 307

SEQ ID NO: 401 - DNA, 401 bp, Homo sapiens
ggttaccagcggcctcgcaccctctaatttcaccatgcctgggaccccctaggccagctggtcactcacatcgatgctcaggtcccacagtagcagtcatggccactttagtttggggcaggccccagtggggatacaagctcttggtgcatctcccgtctgctgcactttgacagccactgtcccggcgcctttactgcycagtaaatggtgggtgtggctggactagcaagtggggaaaggataataaacggagcttggtatttgtgttgggagagtgggaatcagaatgaagtcaccataaagtcccttttaataacagtagagaagattctaggcttggtggtattatctcctttggaaattgtcccaaattctctctctattctcccctcctccta

SEQ ID NO: 402 - DNA, 401 bp, Homo sapiens
gcccaggagcctcctcccgagagagctcgttgtggaacctgccatgtggcggtttctcttccatcccgcctctttcctttgtcctctctcgggactgtgccagcgtgccccagcctgtgttttgaaactttagaccccagcttgtatttggtagagaaatgagctcatgagggcttcctccgccacccagcaaccgggaarttgagtcaaatctctttcatttcagatccatcccccacccccacccccaggccagatttgccacccttctgacagaaactgggttagctgttctctgggactgtttgtgaggaggggacttgttgacctgaacaaaggaactacaaacaagacaggggagggatgtggctgattgctcactgggattgggacttttcagc

SEQ ID NO: 403 - DNA, 401 bp, Homo sapiens
ggaggttctcttctgtttctgtcttggagcagaataaacaccctgggcagtgtctacccagcctctaagagggcctggccacaggcactctctcttgactgagtggtgatgggggacagccaggcctttctcttctgtgccgctgtgtaagtggctggtctggaagaaccaaacccactgcagcctttgctgtaagcttcrctctcctttctagaccgccagagcatcactgtggcatcagggattactcaactactaataaagtggttcaatcatccttcatttagagaagattcccattatacccatccctgtccagtctttgaaataatgacttagggaaatatctgttcattcagctgcctctagcctacatcccaacaaagaaaagctgataagtg

SEQ ID NO: 404 - DNA, 401 bp, Homo sapiens
agtgagccatgatcacgccactgcactccagcctgggtgacagagcaagaccttgtctcaggaaaaaaagaaagaaaaagtgcagggggccttgagagagaataacaggcaggaaggaggtgggggtcttattccaggctggggtgggcgtgggagtgtcagaggaggcttttctgaagaagcaacctgtgaagctcgackgggaggatgaacaggaactagcctggggtgggctggaggctggggcattttggctgggagaatagtctgtgtgcaggtccaaggtgtcgcaggtggggaggaactgggtgtgttggaggagcagagtgcgggaaggaaaacttgggtcagctggtctggtgagccacggtaggagatttggactttcttcccacagcccc

SEQ ID NO: 405 - DNA, 401 bp, Homo sapiens
tcacagcgtagaggccagaagtccaaagtcagtgtcactgggctgaaagcaaggtgtgggcagggctgtgttcctttgggaggctctgggggaaaatctgttcctctccaattccagcttatgggggctgctggcagtcctgggcttggccacatcacgccagtcttcaaggccagcatctccacatctctgctctgcctwcacagcaccttctgtctatgtcaagtctccctctgcctccctcttaaagggcacatgtgatcatttttggaacccacctagataattcaggagaatctacctcccctcaggtcccccttctttttttgagacaaagtctcactctgtcacccaggctggagtgctgtggcaccatcatagttcactacaggcttgacctc

SEQ ID NO: 406 - DNA, 401 bp, Homo sapiens
ggtccaagcgattctcctgcctcagcctcccgagtagctgggattacaggcacatgccaccatgcccagctaatttttgtatttttagtagacacagggtttcaccatgttggccaggatggtctcattctcttgacctcgtgatccgcccacctcagcttcccaaagtgctgggattagaggcgtgagccaccaaacccrgctttttttttttttttttttttttttggagagagagtgtctcattttgttgcccgggctggttcaaactcctgggctcaagtgatcctcccacctcagcctcccaacaccctgcgattacaggcatgagctaccgcacccagccagatccccatgttaagatgcttaactcaatctcatctgcaaagactctttttcct

SEQ ID NO: 407 - DNA, 401 bp, Homo sapiens
gggagggtcaggaatttaaagtgaaaacttgtgtttcctccaaccatgctaaccaatgagggcacacacttgcagaagacagagagttgccagcactttgggaggcctaggggggcggatcacctgaggtcaggagttcgagaccagccaggacaatatggcaaaaccccatctctactaaaaatacaaaaattagccggrcatggtggcacacgcttgtaatccagctacttaggaggctgacgcacaagaatcacttgaacccggaaagcagagattatagtgagtcaagattgcgccactgcactccagcctgggcaaaaagagtgagactctgtctcaaagaaaaaaaatacaaggggaagggaatgagacaccaccttttgatgggagagtgagaa

SEQ ID NO: 408 - DNA, 401 bp, Homo sapiens; identical to SEQ ID NO: 4

SEQ ID NO: 409 - DNA, 401 bp, Homo sapiens
acgggacatctgggtgttgggggggaggggtgacagatgggctgagagagccccggggccctgtaccagcccgatgcctgggcccatgggccccgggagcctcggggctggcacgggtctctcgccttggctctagttcccacagaggaaaacaggcctagtggagtcctggaatgtcagattctgggattcgggagaggrgctggcttctgccctttcaaggaaaagtcttagcactaggtgcaggggaggagaggctggcagccagcagccagctggggcggccccttcccccaggggacaggaagggaggggacaggaagggaggggacggcttgggccagcccccagagggccaaaatgcagcctggtgagaccgaagggaggaccaccgaggcccc

SEQ ID NO: 410 - DNA, 401 bp, Homo sapiens
tctgcttttgcttcctttgccgtgggtctctgtgtggctgtatctcccctgtcaccatgtctgtgtttggctttatgacaccccccttcccccactctttctccagacgtggcggtttcagctcaacttagcctcctccctcctcatgctaaacccctggccctccacaggcgtttggacacatctctggagacccaagtstttgtgtgttgctctcggtgtgtccacaagcacaatgccatagagcacggatggccaggccaatgagtgcccggccctggggcgctcgtcctcttgtgcagaccaggctggccgtgcaccagcgagtgtgcaccgagaccccaagggcgtggggtctccgcgcccgggctctatctgtccccgaccacccccgagccctc

SEQ ID NO: 411 - DNA, 401 bp, Homo sapiens
gggtctccctatgttgcctaggctgttctccaattcctgggctcaagcgatcctcccacctcggcctcccaaggtgctgggattataggcatgagccacctcactccaccagccagccataatgtaaaacttttgagtttcaaagaacatcatcaagaaagtgaagagacaacccatggaatgggaggaaaaaaattgcartcatgaaactcataaggtgctgggacgagccaccacacctggccaaactatacactttaaaaaggtgagttgggccaggcacagtgactcacgcctgtaatcccagcactttgggagggcaaggcggatggatcatcggaggtcaagagttagagaccagcctggccaacatggtgaaaccccatctccactaaaaatac

SEQ ID NO: 412 - DNA, 401 bp, Homo sapiens
acaggtgaaactctgtctcaaaataaaataaaataaagaaagaagaggcctataccttcttccaagccttgacggctcagcacatacttctctgttttcatgctcaagcctaggtttagtaggcctgagtggcagtgggagattcaagtgctgggggagacctttggcctcacattcagattccaccttgagtcccatgayctcattgcaaggttagacttccattgtttaaggtaaataccattttgataactcagttacggcttttcatgtattattatgctaggagggaggctgaagagtgggagtggccctggctcctgaacacactattctctttcctgcctgaaggcctccgcatgtgccattcctgattcttggaatgtttgtcccttggcctt

SEQ ID NO: 413 - DNA, 401 bp, Homo sapiens
ctttggcctcacattcagattccaccttgagtcccatgatctcattgcaaggttagacttccattgtttaaggtaaataccattttgataactcagttacggcttttcatgtattattatgctaggagggaggctgaagagtgggagtggccctggctcctgaacacactattctctttcctgcctgaaggcctccgcatktgccattcctgattcttggaatgtttgtcccttggcctttatcatccttcagagttcattatcaaagccacccctcacaaagcccttcctccgccaccccattcaaaagatctcttgttattttccatcccagcccctgattccttttctgtatagcactgtcaaagtgttttcaggccaggtgtggtggttcacgcctg

SEQ ID NO: 414 - DNA, 401 bp, Homo sapiens
ggcggggcgcagggggcagaggctcgggggtcaacgggggtctgagcagggagaactggcgggggaggaaactgggggctacttgatggcgttcagcgggtgtggtggaaccagccctggaggattgagccttgaaatgaggtttgggagccttcgacagcgaagacgggcggaggagcgagggttaggagagtttccttygggtggaggaagagtcaaggggtattgaccaagaaggcgtggcactgccccttcctgtggcaagaacggggtgaggagccgaattgaagaccagccttctcctggcggtggaaagttccatggccaaagctcagggagaggccaggcctgtgagatggtgggggttgggttgggtgacctggtggccgttttagactcgg

SEQ ID NO: 415 - DNA, 401 bp, Homo sapiens
ttgaccaagaaggcgtggcactgccccttcctgtggcaagaacggggtgaggagccgaattgaagaccagccttctcctggcggtggaaagttccatggccaaagctcagggagaggccaggcctgtgagatggtgggggttgggttgggtgacctggtggccgttttagactcggaagaagcccatctcacccctgcctstttggagattggacaagagcctcccctgaagtttttgtagttgagttgcagtaaagtaggtgcccgagaaggagggagcaagaaaggaaacaagctttggggaagaggaagctctgctaaggctcgagagagtattggcgttgagcagctggtgttggggtctttggattggcccttagaagtcggtggtgaataaggtg

SEQ ID NO: 416 - DNA, 401 bp, Homo sapiens
accgtctggagtggaaagcacgcagagattataaactgtccactcccaggaagcttcacacagcctttatgtgacttgtactttttccagaattgggattttttaaacgtaaaaatgtagtttttggctttgcctgaaagacatgaagatgtaatggaaccaaaccagaacacaggcctgttttcctgcccagcagtcccyggcaggagccgagtacctctttcaggcaggagatatgccattccctagcctgtagatcttactcagcttgcctcatctcagctactgcttgccctctgtctctgtaggcctttggcttgtgacccctaccttaaacatatgctccatttagtaaatggtaacacgtaacagttctttataaattgcacattacagtgtga

SEQ ID NO: 417 - DNA, 401 bp, Homo sapiens
caaggcagtttggttccagggtagttcgaaatcttattcactgatatagtcagcaaatgtttattgagcacccaccaattgccaggcactgactcactcaaattagagcactgaacaaaatagaccccctcccccatccgtggcagacgtgtcataatgagaggaagacagtacaataaatgaacagatgaatgtatgtcyggtgatgagtgtcagggttggtgtgcttagcactgaaaatgggggcttctgaggttcaaatggttgcagttcctaaagaaggttgagggccttgccttcaggtcaccgcgggagactggcccctttccactggaaacattgctttgcccagtcagtatttgagagctcagcctgcaatggagaaatcacacttctcctct

SEQ ID NO: 418 - DNA, 401 bp, Homo sapiens
aaaaagaaagctgtgtgctaaatactattttaagcaattataatggattaaaaactcctttaatcttcacaacaatgttttttctttctttttttttgagatggagttctttgaaactcttggattaaatgactcttcagagctttctttgctttttgatactaaggagtggcatgtctggggatttttatagcaaataayttctccttggctactatccttagaattccaagtgtttttaatgaaaagaggagacttgtttttagtgatgttagttgtttttaggaaaggtgttctgcagtgtttttcgctaaggtggctcacgcctgtaatcccagcactttgggaggccgaggtaggcagatcacttgaggttaggagtttgaggccagcctggccag

SEQ ID NO: 419 - DNA, 401 bp, Homo sapiens
actaactttattctgacttcaagcatcgtgttccattgatgcttgctttccaaggtgttttgctgattcacatcagcatgcaacctgcttgacagaatacagtgatgttctcactgtaaattcatcacctgctgctgtggtctcatgtatcatcccgtgcgctgttagctgaggccagtgctcctgtgtctcctcagcacragggcactggcaagagtgcatgtctgggcctataaagatgttggccaggttctaggcagggttgaattcaccaaggtaactgccatccatccctcaataggcattttttctcctacacaccctcaggcacatgccacgtgtacctggcacccttacttacgaagttaccgaattcctgccatgatactgtgggtcaccct

SEQ ID NO: 420 - DNA, 401 bp, Homo sapiens
ggaggttgcagttagcggagatcacgcctctgcactccagcctgggcaacaagagtgaaactctgtctcaaaaaaaaaaaaattatcataaaatcactcgttttaagtatatcatccaaggattttagcaccttctacagagctgtgcagctattgccacaatccaattttagaacattttcatcatcccctaaagatccytttacccatcactccccattcccacccccagtaccaagcagccactcatctacttcctgtgtctattgatttgccttttatggacatactgtacactttcattcatatgaagtgtctagataaggtaccctctaacgggtgacttttcatggttagcttttttcaaatgatagggaatttcctgcttcagaagatgcttt

SEQ ID NO: 421 - DNA, 401 bp, Homo sapiens
gtgcccaaataggagctgtaacaagccgtggtgcaggggtaggacctgtgttgtctttggagccatgggctgggctgcaggcactcgagttaagaagcttccttctgaggctcttccagtaatttgagtgtcctgtggcctgcctgggcagagagtggacaggaaagatcaggaaaagcacgtgtgaggactaccgagggygctgatagcgcctctccttcccaacttcacttctctggctctgacctttcagccctaagctccccttggccctgtgggatggggcagcatccagaagggtcttggagtcaggttttgttttgtttttttttttttaagtcatgtttccattgggcgtagtggctcgtgcctgtgatcccagcactttgggaggccgaggc

SEQ ID NO: 422 - DNA, 401 bp, Homo sapiens
tggatgctgtggtgagaggcgcacagggccagctcattctttgtccctggcagtctctcgaaagctctttcactgtgctgtttctttgtccccttgcagagaatgccacgggtgacctggccaccagcaggaatgcagcggattcctctgtcccaagtggtaggttcttaaagagacccgcgatggagtgaggccaccggrtgggtcattgtgaaaggacacttgtcatttgggaactgtcacaggcttccctctcatggttctgtttactcaaaattggcaaaccgggggctctgcctgggctgccggcttctggctccagcatccttatgggggagtttatactgtccagctgacacaggggccggggatcctgcagcacttcctggctggcccccatc

SEQ ID NO: 423 - DNA, 401 bp, Homo sapiens
tagactgtagcccacaccttgaagcactgccctcgagggcgcaggaggggcgcatgctgtccagggaggaccaagaccttccggggttggaggggcttaaccgagtccttgtggcgtccatgacgcttctcctctcgtggttctgtgctctctgcatcttgaaggggtggtgggagggcgctctaggtcaggccttgcacygcctgccctgggcttttctgtcaagtctccaacacacccctgtgtgggaacggggacagagaactgcccggctgaatttggccttcaggcccaatcctgctgcctcctgtgggtgttcctttcctgacactagactctagaagcccctttcctccctcctctattccaacaaggaggtcctggggtacaggcatctgggc

SEQ ID NO: 424 - DNA, 401 bp, Homo sapiens
tctcaagtagctggaactacaggcgagtgccaccatgcctggctaagttttaattttatgtagagatggtctcagtatgttgcccaggctgatttcaaactcttgggcccaagtgatcctcctgccttgcttccctcccaaagtgctaggattacaggcatgaaccacttcacctggcccatgctatatgtttgcccctcrtcttcttacctactccctcagttttctcatctgtgaagcaggggttggaacagtaggggttgaatgtttgtgtcttccccaaactcctgtgctgaagctgagtgatggtatttggaggtaggacctctgggaggtcatcaggtgatgtgggtggagcccttattaatgggatttgtgcccttatagaaagggacacaaca

SEQ ID NO: 425 - DNA, 401 bp, Homo sapiens
ccccaaactcctgtgctgaagctgagtgatggtatttggaggtaggacctctgggaggtcatcaggtgatgtgggtggagcccttattaatgggatttgtgcccttatagaaagggacacaacatgagatgatcttgctctgggccatgccgggaggaagggagaaggtggctgtcaacgagccaggaagcggcactcctsacactggatctaccaacacccctatctcagacttccagcctccaggaccgtgagaactgtttcctgttgaagccaccctctctatatttgttacagcagcccacactgattaagacactttttttttttttttttttttttttttttttgagatggagcctcgctccatcacccaggctggagtgcaatggcgcaatctc

SEQ ID NO: 426 - DNA, 401 bp, Homo sapiens
ttgtcgcggtacgcaggaaggcaggggcagcacctccctcttcaagaacgagcatctgagcttttgggggaaacctgtagctccccgaatgccatccacagagcccccctcagtcggcctcccctgaggcaccaaggctggcggaagcagtcacctgtccatctcccccacttctcacagaggaaatcctgggtggtgccrggcaatgagtcagggctgaggaccaggacagaggttgggtggggcgtctcagcattcctccaacgggcaggtctcagcgctcctccccctgctccgctcctctgcagggcccaggcgcccttggccttaggacccaacttctcttaccgccatggagttcgacctgggagcaggtgagctcctggggagtgtggactgga

SEQ ID NO: 427 - DNA, 401 bp, Homo sapiens
gggccggactcaagcccagaagctgcctgcaccaaccacccaacttctctccacagccctggagcccacctcccagaagcccggtgtgggggcgggccacgggggagatcccaagctcagtccccacaaagttcagggccggtcggaggcaggggcaggtccgggtccaaaggtaagtcgcctcatcaccggctgcggagrggcgggaaggctggggttgcccctgaccccagggtcctgccttaggcctccaacttcagggggctgggtaaggggcgccgcctcactgccgcacctccatccagcaaggacaccacagctcttccgactccagcagcagctccagcgattcggacacggatgtgaaggtaaggggctctcgccagcgtccccaagcacgt

SEQ ID NO: 428 - DNA, 401 bp, Homo sapiens
ctacaggtgcacactgctatgcctggctaatttttatatttttttagagatggggtcttgctatgttgtccaggctggtatcaagctcctggcctccagtgatcctcctgcctcagcctgccaaagtgctgggatcacagatgtgagtcacgtgcttggcctaaacttttaaatgatgagacttaagtcaaagtttatccraggctctgccctggcccaccagccaccacagtctgccctctgcttctcacatgctcacagtgaatcctcccagcaccttgaggtgcaagtatcatcatcctattttacaaaaggggaaactgagtttattttttatttttatttttttttgagacggagtctcgctctgtcacccaggctggagcgcaggtgtgcgatct

SEQ ID NO: 429 - DNA, 401 bp, Homo sapiens
gacctcaccaccatcgacctggtggccttcttgggctacaaatatgtcgggtgagtacccccgcccttcacgccagccccagcccttgggccttgtcctcacacagcctcctctccctcccccaggatgattggcggggtcctcatgggcctgctcttcgggaagattggctactacctggtgctgggctggtgctgcgtrgccatctttgtgttcatggtgagctgggctcggggctggtgaggctgaggcacaggtgccccggaggcatccaggcatccaagcagaggatgtcaggtgtggggttcagaccagagacacattgctgaactgaggagccctggagtggctgcccggcctggggggtcaggagggcttcctggaagagggggtatcctgag

SEQ ID NO: 430 - DNA, 401 bp, Homo sapiens
gagctgtgggatgaatgaggttcgccaggtctcccttacctatcctgggtccccagctccttctcactctcttcccttgcagcctcgaagcggaggatccctgtgtcccagccgggcatggccgacccccaccagcttttcgatgacacaagttcagcccagagccggggctatggggcccagcgggcacctggtggcctragttatcctgcagcctctcccacgccccatgcagccttcctggctgacccggtgtccaacatggccatggcctatgggagcagcctggccgcgcagggcaaggagctggtggataagaacgtgagtgggcggggctggtgggagtggggggatgcacggggccacagggcttcagacttgagctctgcctccccagatcg

SEQ ID NO: 431 - DNA, 401 bp, Homo sapiens
atccctacaattttttttttttttaatttagccaggctcagtggcttaacgcctgtaatctcagcactttggaaggctgaggatcgcttgagcccaggagttcgagaccagcctgggcaacagcgagatctccatcgctacaaaacattttttaaaatgtaaatatcgagcgaaaaggtcgatgggaaatgcagttctctrcagacagccgttcagtttgggtcattgagagcactggagagccagaaaaggctgtggagcaaggaaaagagaaacatttgtgttcctgaggggctaattggagttgtaggggcttatacaatttttgacatcccttaggtattaaagtaaatatttatttattttgagacagggtcttcctctgttttccaggctgcctc

SEQ ID NO: 432 - DNA, 401 bp, Homo sapiens
caggagcaagtgctgtgagaggcgcagaagcgaggtggaatcttaaaagtgggctccagagagctgtccggcgcgtgggtgttgactcctgcgttctccaggttctagccacgttatgtgcggcccagccatgttccctgccggtcctccgtggcccagagtccgagtcgtgcaggtgctgtgggccctgctggcagtgcycctggcgtcgtggaggctgtgggcgatcaaggatttccaggaatgcacctggcaggttgtcctgaacgagtttaagagggtaggcgagagtggtgtgagcgacagcttctttgagcaagagcccgtggacacagtgagcagcttgtttcacatgctggtggactcacccatcgacccgagcgaggtgaggggaccagggt

SEQ ID NO: 433 - DNA, 401 bp, Homo sapiens
gccaactccttactcattctttgctccctgcaggtgtcagctagcgtgtttgtgggcctggtgatcttctacatcgccttctgcctcctgtggcccctcgtggtgaagggctgcacgatgatccggtggaagataaacaacctcattgcctcagaatcctactacacctacgcctccatttccggaatctcgagcatgccrtctctgagacattccaggatgggctccatgttcagctccaggatgacagaggacagggctgaacccaaggaagccgtggagagacagttgatgacctgagtgtcccacctgccccagcccccagttactgtcacgcctctcttatgaggcccatcttgaagatgcaacctgtcacccagcccaggcctctctttctgttt

SEQ ID NO: 434 - DNA, 401 bp, Homo sapiens
taaataatttaatcctcataactctatgaggtgagtatcattccattttagaggtgagacagttgaggcacatagaggataggtaatttgcccagggtcacacaggtgtgagtcagggtgggcgtctatatgctcttaactgtacacctgactggtatacagtaagcaaagggaaggctggggaagatgaattgaaatcarcctctatctgttctgcccaaggagtgttcatttcatacccacatccactacactgagtatatttgcatacacactcacacacacaacacacacatacaatcgggacagtttcacatgaaggaaacagatccccaccttcccttgaaatgatgatgtccagatggcaaaagctaatgcatatatatgttgaagcacatgaa

SEQ ID NO: 435 - DNA, 401 bp, Homo sapiens
tgtggcagggaatgttgctggggtgggggggtcttctgacccctcacttacatccccctcccaccccagaatgtgccccccgatctggccatctgttgcttcgtcctggagcagtccctgtctgtgcgagccctgcaggagatgctggctaacacggtggaggctggcgtggaggtgaggaccccacctgggggtgggcgrggtggcagagatgggcgagaggacccaggggtcgtttagggcacggtggcaaggatgggtgagaggacccgggggtcgcttaccatctgctcttcttcctctctctgccctgccccccacaggccctcaatttggataagtgggtaggtccggccttggatgtcacctgtccttccacccctcctgaccccaggcaggcc

SEQ ID NO: 436 - DNA, 401 bp, Homo sapiens
ggaatgttaagtcagcagtaggtacaggtggaaagggtctggcctggagacagagacaggaaggagatagggatagagagatagagagggagaggcagggacagaggtgagagagatagagagacaaagacagacaaaaccaaaaacagggacagagagagacagagaggagagagagaatcaaagacacagaggagacaratgacgggggacagaaaaatgaggaggaatttgcagtgagattctgcagagcagggaggagggggcaagtgcagaactcaagtctagacagacgtcttgggggcatggccctgggtggctgggcccactccagacctctgtctccccactcctaggccatgctgcaccaggagggccacatggacgacgcactgtcgctg

SEQ ID NO: 437 - DNA, 401 bp, Homo sapiens
cccgtctggggatggactgggggctggggatgctgtgctaagggctggggaggtcgaggggtcttgtggggaggctgaggttagggaggaaggagacttgggttagggtgaaggtcatagggtcagggctctggggtcagaggtgaatgtccaggattgaggagttaggagtttcagagagagagagagggagggtatgartccaggatccaggctcagggtctgcctagagtcagggaaaatgagagcagaggtcacatgtccacgtaaggggtaaggggccaatggtaagaggtgagaatctggaggtcgttggagtcgtctaagtaagggatcctgaaattataggtgagcagttacacgtcctgagttcagaggtcaaggactccagacccaggagt

SEQ ID NO: 438 - DNA, 401 bp, Homo sapiens
attataaagttttacatattaaaataaagaacaactttgtcatatttgaaagaaggccaaggttacattatccatttattttaacattagacacagtcagcccaatgaaggaggaggaggaaaaggaggagaagaagaaaagaaaaagaaagaaagagagaggaagaggaagatgatcagagtggaaatgtggccaggcgmggtggctcatgcctgtaatcccagcactttgggaggctgaggtgggcggatcacttatttatatacctcctatggcatatacctctccacatttttataattgccatttatatacgtttctaagttcctatagtattgtccttcaaggcaaaaatcctggtattatcttcttgatattcttagggcctaatgttaccaaa

SEQ ID NO: 439 - DNA, 401 bp, Homo sapiens; identical to SEQ ID NO: 2

SEQ ID NO: 440 - DNA, 401 bp, Homo sapiens
atcccagcactttgggaggccgaggcaggtagatcacctgaggtcaggagtttgagattagcctggctaacatgatgaaaccctgtttctactaaaaatacaaaaaattagctgggcgtggtggcacgtgcccgtagcacctgtaatcccagcaacttgggaggctgaggcaggggaatcacttgaacctgggaggcagasgttgcagtgaactgagattgcaccgttgcactccagcttgggcaacaagagtgaaattctgtctcaaaaaataataatagaaaaaaagaatgtatagtctcctgggtcaaagagatctgaatttggattttgcctagatacatcattaattcatttcaaaatacttatcaagtaggtattctttcttcacttggcttcca

SEQ ID NO: 441 - DNA, 401 bp, Homo sapiens; identical to SEQ ID NO: 277

SEQ ID NO: 442 - DNA, 401 bp, Homo sapiens
gctcaggtcttggccccactcctcttttccgcctgtactcacctggtgcttgtgccgagagttcattcttcccattgtatttactaacaccaatgtgctgatgacttccaaatttatacttttagcccggatctctcccttaaactctacagtcgtaatgcaactgtcttctttaatatctccatttgatgatgaacatayatctcaaacttaacatgcacaaaatggagcttctgatcttcatccccaaacctgatttttctagagtcttccttgtattggtaaatgataacttcattctccctgttatgtcagtttcttcattggaaatgggcatagaacctgtctcagggctgatataaagaataaatgagataatatagtgttaccgctactcataa

SEQ ID NO: 443 - DNA, 401 bp, Homo sapiens
atgacttccaaatttatacttttagcccggatctctcccttaaactctacagtcgtaatgcaactgtcttctttaatatctccatttgatgatgaacatatatctcaaacttaacatgcacaaaatggagcttctgatcttcatccccaaacctgatttttctagagtcttccttgtattggtaaatgataacttcattcyccctgttatgtcagtttcttcattggaaatgggcatagaacctgtctcagggctgatataaagaataaatgagataatatagtgttaccgctactcataagacctacgacagtcagcattcaataaaagtgaggagaggacagcataacctttccattctttcatctaatggctctgttctttccttctctttcagaccc

SEQ ID NO: 444 - DNA, 401 bp, Homo sapiens
atctcaaacttaacatgcacaaaatggagcttctgatcttcatccccaaacctgatttttctagagtcttccttgtattggtaaatgataacttcattctccctgttatgtcagtttcttcattggaaatgggcatagaacctgtctcagggctgatataaagaataaatgagataatatagtgttaccgctactcataakacctacgacagtcagcattcaataaaagtgaggagaggacagcataacctttccattctttcatctaatggctctgttctttccttctctttcagacccttactatcttatcctagaaccattacaaaaatttagtaactggtagccttgatttagtagtaaagtggtaattatagaaaatattattctccccatttaaa

SEQ ID NO: 445 - DNA, 401 bp, Homo sapiens
aagtggagcataatattgttctacccatataaatttgttcagacaaattatgctaaatccactactcaaaatatgatgtttcttctttttagaaggttctaccctgctttctatgctggtaaaatatttttgttttgagaactaatgcaagtgtcatctcccctataaaatctaagtgttttttacccaagcagtgatccrtttatcccctttatttgttagcatagattacctttattttagcacttacttgctattcaaaaattatctgttgctgtatttgttcctcccagcagactatgagctgcctgaaggcaagatctggggggtcttacgtggccagaagcgtttattaaattaaattccttgaatgatagaaagaaagctcaatggaaaccttc

SEQ ID NO: 446 - DNA, 401 bp, Homo sapiens
tgtttttaccaccagaaaaaaaaagagagaacagaaaatggtaaatagttatctcatgttgatgaaatggtggatatattaatcaccttgattatagtgtttatttcaaaatgtatatgtgtatcaagacatcaagctatgcaccttaaatatatacaatatttgtttatcaattatacctcaataaataggaaaaaaaawtgtgaaagacttttggcttctacttaggatatagaaagcaggaaagagtagcactcctagaagtactagaaaataatgctaaagaatctgcagattcacagctctttatttttatttatttatttatttatttaaactaatcagagaactgaggtcgcaagacaacaaactggtcctaaataaaaagtaagaaaaatgcc

SEQ ID NO: 447 - DNA, 401 bp, Homo sapiens
ttcaaaatgtatatgtgtatcaagacatcaagctatgcaccttaaatatatacaatatttgtttatcaattatacctcaataaataggaaaaaaaaatgtgaaagacttttggcttctacttaggatatagaaagcaggaaagagtagcactcctagaagtactagaaaataatgctaaagaatctgcagattcacagctytttatttttatttatttatttatttatttaaactaatcagagaactgaggtcgcaagacaacaaactggtcctaaataaaaagtaagaaaaatgccggggaggagccaagatggccaaataggaacagctccggtctacagctcccagcgtgagcgacgcggaaaatgggtgatttctgcatttccatcggaggtaccgg

SEQ ID NO: 448 - DNA, 401 bp, Homo sapiens
tgtatatgtgtatcaagacatcaagctatgcaccttaaatatatacaatatttgtttatcaattatacctcaataaataggaaaaaaaaatgtgaaagacttttggcttctacttaggatatagaaagcaggaaagagtagcactcctagaagtactagaaaataatgctaaagaatctgcagattcacagctctttattkttatttatttatttatttatttaaactaatcagagaactgaggtcgcaagacaacaaactggtcctaaataaaaagtaagaaaaatgccggggaggagccaagatggccaaataggaacagctccggtctacagctcccagcgtgagcgacgcggaaaatgggtgatttctgcatttccatcggaggtaccgggttcatc

SEQ ID NO: 449 - DNA, 401 bp, Homo sapiens
aaataatgctaaagaatctgcagattcacagctctttatttttatttatttatttatttatttaaactaatcagagaactgaggtcgcaagacaacaaactggtcctaaataaaaagtaagaaaaatgccggggaggagccaagatggccaaataggaacagctccggtctacagctcccagcgtgagcgacgcggaaaaygggtgatttctgcatttccatcggaggtaccgggttcatctcactagggagtgccagacagtgggcacaggtcagtgggtgtgcgcaccgtgcgcaagccaaagcaaggtgaggcattgcctcacttgggaagtgcaaggggtcagggagttccctttccgagtcaaagaaaggggtgatggacgcacctggaaaatcgg

SEQ ID NO: 450 - DNA, 401 bp, Homo sapiens
ggaagaaatagttcaccaaaaagaaattggaatacaattggtgaaaataggctgaatatatgatgtgtggcctgaaaaaaaatatccattacaaacatgaagatggctgtgatatattgccaaattcccacaaccttttatagcccctgtatccacatcctttgtcatgtaaattttcagctccctccctttggatcaggkttatatgtttgatgagctttgaccaacagaatgcaattggaatagaacaatattgggaaaatcttatttgttttaaaacttcattcaaaactagtcccatgaaaaggcaaactgagtattatgttagctgtgggtttttcatatatagtttttacatggaggtggtttttttatttctggtttgttgtacatttttatca

SEQ ID NO: 451 - DNA, 401 bp, Homo sapiens
aataggctgaatatatgatgtgtggcctgaaaaaaaatatccattacaaacatgaagatggctgtgatatattgccaaattcccacaaccttttatagcccctgtatccacatcctttgtcatgtaaattttcagctccctccctttggatcaggtttatatgtttgatgagctttgaccaacagaatgcaattggaatasaacaatattgggaaaatcttatttgttttaaaacttcattcaaaactagtcccatgaaaaggcaaactgagtattatgttagctgtgggtttttcatatatagtttttacatggaggtggtttttttatttctggtttgttgtacatttttatcatgaaagggtattacattttgtaaaatgcttttttctgcatcaatt

SEQ ID NO: 452 - DNA, 401 bp, Homo sapiens
acaagcaatggggaaaggattccctatttaataaatggtgctgggaaaactggctaaccatatgtagaaagctgaaactggatcccttccttacaccttatacaaaaatcaattcaagatggattaaagatttaaacgttagacctaaaaccataaaaaccctagaagaaaacctaggcattaccattaaggacataggcrtgggcaaggacttcatgtccaaaacaccaaaagcaatggcaacaaaagacaaaattgacaaatgggatctaattaaactaaagagcttctgcacagcaaaagaaactaccatcagagtgaacaggcaacctacaaaatgggagaaaattttcacaacctactcatctgacaaagggctaatatccagaatctacaatgaa

SEQ ID NO: 453 - DNA, 401 bp, Homo sapiens
aattttcacaacctactcatctgacaaagggctaatatccagaatctacaatgaactcaaacaaatttacaagaaaaaaacaaacaactccatcaaaaagtgggcgaaggacatgaacagacacttctcaaaagaagacatttatgcagccaaaaaacatgaaaaaatgcttatcatcactggccatcagagaaatgcaartcaaaaccacaatgagataccatctcacaccagttagaatggcaatcattaaaaagtgaggaaacaacaggtgctggagaggatgtggagaaataggaacacttttacactgttggtgggactgtaaactaattcaaccattgtggaagtcagtgtggcgattcctcagggatctagaactagaaataccatttgaccca

SEQ ID NO: 454 - DNA, 401 bp, Homo sapiens
ggtgcagcacagcagcatggcacatgtatacatatgtaactaacctgcacaatgtgcacatgtaccctaaaacttaaagtataataaaaaaaaaagaaaaaaaaaagaaaaatgccttcaggaagagccaggacatgaacacatgttttcttaggatagacgccacaagtaaccatataagctgttgatgataattcaacyaatgttttaaaaattggtaaaggctgagtatgggttaagataagattatggaatccctgcaagccacagagaaatgggagttcacactattcactggctcttctcaatagactacaaatttcatcaggtgttcacaagaatgattggaggcagggtgagaatccaagaaaaatttactcatggctcatatttcaaagaga

SEQ ID NO: 455 - DNA, 401 bp, Homo sapiens
tggaggcagggtgagaatccaagaaaaatttactcatggctcatatttcaaagagaaaaatagcagcctgtgtagcattggaataaagccatagattcttcaccctacctcttctatagcgcacatagcttaagcttgtaagaaaaagacaataaacaatgttggccttgggacagtggtgaagatccactgcatctggaragaagaaataaacatagactctctatctctgaaagaaaggcaacaatacatgctaagctcagataaacagctctcttgcagtttaggaaagggcagtatcatggagaaggcaccactatcagggtattcaggaacacaatgcctatctgaaactgagcctcaatccaaacaacagaaaacactctgctcctctcctcagt

SEQ ID NO: 456 - DNA, 401 bp, Homo sapiens
ttatatagtttggatatttctcccctctaaatatcttttggaaatgtaatccccagtgttggaggtgaggcatgtaggagatgtttgaatcatgaggacggatccctcatacatggcttagcactgtccccttggtgatgagtgagttcacacaagatctggttgtttaaaagggtgtggcacctcctccctctctctctyggtcctgctcttgtcatgtgacatgctggctccctgtcaccttctgccataactgtaagctccctgaggcttcaccagaagcagatgtcagcatcatgctttctgtaaagcctgaagaatcatgagtcaattaaacattttttttcttttttttttttgagacagagtctcacttggttgctcagactggagtacagtgg

SEQ ID NO: 457 - DNA, 401 bp, Homo sapiens
gaatttggctgcattgtgtttatgctgtagagatatttggaagcctgaacttaagagtgatgacttaggatatgtgggagaagaaatttctaagcagcaaaacatttaagatgtgacccgactgcttctaacagcttatactcagatgcaggagcaaaaaaaaatgacttaaaggtgggatttatatttaaaaagaaagcmaagtataaaactttggaaaatatgtagctttgcaatgtagtagaaaaggaaagctcattttcaggggaagaatctaagcaggcggcagagtgcccacttgctggagagatcagcatgattaaaagggagccaaatgctaatagccaagacaataaggaaaggcctgaaaggcattttggagatcttcaaggcaacccctc

SEQ ID NO: 458 - DNA, 401 bp, Homo sapiens
ttctaagcagcaaaacatttaagatgtgacccgactgcttctaacagcttatactcagatgcaggagcaaaaaaaaatgacttaaaggtgggatttatatttaaaaagaaagccaagtataaaactttggaaaatatgtagctttgcaatgtagtagaaaaggaaagctcattttcaggggaagaatctaagcaggcggcrgagtgcccacttgctggagagatcagcatgattaaaagggagccaaatgctaatagccaagacaataaggaaaggcctgaaaggcattttggagatcttcaaggcaacccctctcatcacaggctcagagaccaaggaggaaagaatgatttcatgggccagacccaggtccccactgacctgcacagccttaggacact

SEQ ID NO: 459 - DNA, 401 bp, Homo sapiens
gttcaggtcacagctctggaaagcacattctgtaagccttggtggcttccatgttgtattaaacctgcaggtatttagcacacaaaagtaaaagaggcttggcaacttctacctagatttcagaggatacatgagaaagcatgggtggccaggcagaagcctgtacaggagcagagcccccacagagagcctctgctaggrtagtgccaaggaaagatgtgggattggagcctccacacaagtcctcactgagacaactgcttagtgaagctgtgggaatggggcctctaccttacagcccctaaaatggtagatacactagcagcttacatcctgagcctggaaaagccacaggcattcaactacaacccatgaaagcagcaacacgggcttcgcccagg

SEQ ID NO: 460 - DNA, 401 bp, Homo sapiens
aaggcgattatcttgaaactttaagatttaatgacagccctgctggatttcagacttgtgtggagcctgtagcccctttatttcggccaatttgactcccttttaaaatggaaatgtttaatcagtgcctgtatctccattgtatcttggaagtaaataatttattttgattttacaggctcataggtggaaggatatgtstcagatgagacttaggacttgatgttggaaagagctaagactttgggggaccttgggaaaagatgattgtattttgccatgtgagaagtacatgagatttgggggccagagggagaatgatatggtttggatgtttgtcccctccaaatctaatgttgaaatctaatcctcagttttggaggtggaatctggtgggaggt

SEQ ID NO: 461 - DNA, 401 bp, Homo sapiens
agacttgtgtggagcctgtagcccctttatttcggccaatttgactcccttttaaaatggaaatgtttaatcagtgcctgtatctccattgtatcttggaagtaaataatttattttgattttacaggctcataggtggaaggatatgtctcagatgagacttaggacttgatgttggaaagagctaagactttgggggascttgggaaaagatgattgtattttgccatgtgagaagtacatgagatttgggggccagagggagaatgatatggtttggatgtttgtcccctccaaatctaatgttgaaatctaatcctcagttttggaggtggaatctggtgggaggttcctgaatcatcatgggagcagatccctcatgaatggcttagtgccattcc

SEQ ID NO: 462 - DNA, 401 bp, Homo sapiens
tttttataaaataaattccccaacctcaggtatttctttacagcaatgcaagaatggccaaataccataagcatatcagtaataaatcccaaactgagcttaatttctgacttaaatgactcaaaccaaagactatcttcccccaaaatcctggcaaaattcacagtatacccaattgattcataaaaattacatatatcmgtcttgtcatataaaaatattatgaggtatacaaaaaataagacacaaagaaataaaacatattgtcaagggacaacgcgatcaatggaaccagactcagaaatgaaatagatgttgaaaacgtcagggaatttaaaacagctgattaagatattaaagactctagtgaaaaagatacataaattgcatgatcaggtgaa

SEQ ID NO: 463 - DNA, 401 bp, Homo sapiens
atccaagagctattcaaaatatcaaactatttaacattcagtacatgtctttggaattccagagaagagacagaataggacaaaagaaatctttgaagagataatggctgaaaattttctaaaattaatgaaagacattaaatcacatatccagaaagcccagagaatatgaaacaggataaacacacacacatacgcgcrcacacacacacacacacacacacacaccactatatatattatatttgaactgctgtagaacaaaggcagaaataaaatctttaaggcagcaaagctaaaaaaaaaagacatattatgtcaataaaaacaaagacttttgtcagaagctatacaagccagaagataatggagtaacatctttaaagtctcgagaggaagaa

SEQ ID NO: 464 - DNA, 401 bp, Homo sapiens
acctggctaatttttatttagttagttacttttagagatgagttctcattgtgttgcacaggctggtctgaaattgctggcctcaaaaaatcctcctatttcagcctcccaaagagctgggattatagatgtgagccagccctgttcgtatttgaagatatagatgttgattagccaaagatgcatactataaaccctacrgctaccactgaaagcatttttaaaaagagatataagtacataatccaaagtggagataccatgggattcttaatactcaatttgaaagaaagtggaaagtaagaaaaaaataaagatggagcaaatagaaaatagctagcaaaatagcagatattaatcaaagtatatcatataattagagtaaccataatcaaaacaca

SEQ ID NO: 465 - DNA, 401 bp, Homo sapiens
cacaggcaatttacctccaaatttttactttaatgtcctcattatttgttccaaacccattgattgagctcctgccatgagcttgctactcttccttgttccttttgtacaaaatttgggtaaagaggattcaaggagctaaaggatgcaagtaaattacttgggagtgaattggagggtgccgaaaaaattagtattgcstaggtcatctctaggtcctaggtctaagatataaaactatccattgagaatgcaatattttatatgttcctctatcccttgagcttataagacaacctgagacataattcgtgtcaataactgcttgctgataaaaatgtaattgccatccaaattgtggtaatagagcatgtgggaatatgatgttctttgtgggaccc

SEQ ID NO: 466 - DNA, 401 bp, Homo sapiens
gttccttttgtacaaaatttgggtaaagaggattcaaggagctaaaggatgcaagtaaattacttgggagtgaattggagggtgccgaaaaaattagtattgcctaggtcatctctaggtcctaggtctaagatataaaactatccattgagaatgcaatattttatatgttcctctatcccttgagcttataagacaacmtgagacataattcgtgtcaataactgcttgctgataaaaatgtaattgccatccaaattgtggtaatagagcatgtgggaatatgatgttctttgtgggacccaatgaactatgggcccatctattcatagtatagtcagaaataggactctaatacatattgcagttcttcacatctcaagacctagcataaaatctgt

SEQ ID NO: 467 - DNA, 401 bp, Homo sapiens
gcccatctattcatagtatagtcagaaataggactctaatacatattgcagttcttcacatctcaagacctagcataaaatctgtatttttatatttattaccattcattcatttggatatgtacttgctagaaagaaagttgaagaaggtgcaaaaaaagtatgagggaaaacctccaaattgaaaaaatatattttttwaatttgtttattctctcttctgtaaacttggaacagatcatgatgatgaagtatagccaaagacaaccccaagtaaatttttaaataagctactgtgcagagatgaagtttgagagtcaccattggacctaaattcagcagcttctagcatttgattgacaacaatgaatgtttcccatatgtgatatcacatagttaag

SEQ ID NO: 468 - DNA, 401 bp, Homo sapiens
atagtcagaaataggactctaatacatattgcagttcttcacatctcaagacctagcataaaatctgtatttttatatttattaccattcattcatttggatatgtacttgctagaaagaaagttgaagaaggtgcaaaaaaagtatgagggaaaacctccaaattgaaaaaatatattttttaaatttgtttattctctyttctgtaaacttggaacagatcatgatgatgaagtatagccaaagacaaccccaagtaaatttttaaataagctactgtgcagagatgaagtttgagagtcaccattggacctaaattcagcagcttctagcatttgattgacaacaatgaatgtttcccatatgtgatatcacatagttaagcccccacctccccgcaa

SEQ ID NO: 469 - DNA, 401 bp, Homo sapiens
agattctccctagagcctccaaaaggaaaacaactctgccagcagcctgagtttagcccagcaacatcagtcatctgacctccagaactaagaccataaatatgtcttggcttaaaccaaatttttcataacttgttacagcagcattaaaaaaacccaaaatggccgggcacggtggctcacacctgtaatcccatcacytggggaggctgaggcaggtggaccatgaggtcaggagtttgagaccagcctggccaagatggtgaaaccctgtcttactaaaaaaagaaaaattagccaggcgtggtggtgtgtgcctgtagtcccagctactcgggaggctgaggcagaagaattgcttgaacccgggaggtggaggttgcagtgagccgagattgtgc

SEQ ID NO: 470 - DNA, 401 bp, Homo sapiens
aagatggtgaaaccctgtcttactaaaaaaagaaaaattagccaggcgtggtggtgtgtgcctgtagtcccagctactcgggaggctgaggcagaagaattgcttgaacccgggaggtggaggttgcagtgagccgagattgtgccactgcactccagcctgggcgacagagcgagactccatctcaaaaaacaaacaaamaaaacaaacaaacaaacaaaaaaacccaaaagaaccttaaaaaaaaacccccgattgttttagggaatgaagaccattcttgtgtggtctttttatctagttaaatgcctattttccttaactattagtacagggtaaaataagggcggcttagcaaattaattatgattaacaaataaatacagggataattcactgga

SEQ ID NO: 471 - DNA, 401 bp, Homo sapiens
actaaaaaaagaaaaattagccaggcgtggtggtgtgtgcctgtagtcccagctactcgggaggctgaggcagaagaattgcttgaacccgggaggtggaggttgcagtgagccgagattgtgccactgcactccagcctgggcgacagagcgagactccatctcaaaaaacaaacaaacaaaacaaacaaacaaacaaamaaacccaaaagaaccttaaaaaaaaacccccgattgttttagggaatgaagaccattcttgtgtggtctttttatctagttaaatgcctattttccttaactattagtacagggtaaaataagggcggcttagcaaattaattatgattaacaaataaatacagggataattcactggacaattgttagaagaataatta

SEQ ID NO: 472 - DNA, 401 bp, Homo sapiens
atattctttggtctctgaggtaccttccagccacaagactatgtgaccatatgccagggaatttttggaagacatgcctgaaccgggtcaggggttggactgatgacctcagaggtctcttccaactcaaagattcaatgacacagacacagcaggatgcatcttgtgtagaaagtatttctaagacaactgatttttctkagtctcctgggaggaggggaagtcctctgggagcaaacaaaggcaccagtagctttgggtcaagccctgcttcagattcgggccaaagacaacaagaatgccacaaagaacatcaaagggcagaatctggccctgaaacaagaagagggatggaggggaagtcatgatctgcagtaaaacaaataaataacctgtaaaat

SEQ ID NO: 473 - DNA, 401 bp, Homo sapiens
gcattgtgtagaggttactgaattggccaggacatgcgtggagtcacattgcaactaagtggatgatgatgactgggctgtgggcatgggcaatggttgaaggcctgagaaggcctagacagagtaggacagaacatagccacttttttctttatggagaacttagagcaatagttttcatgcatagcccccctccctaakacaaacttacatagtacccatgatgattcccacctcacaaatgagaaaactgaggctctacaggattgggccaatgtccaaagttacccagaaagaattggtaagctaggattcaagtgaagatatgtaacattccaaagccctggctctcagtgactaaggtctaagaccacccagatagttttgtgttataaatccta

SEQ ID NO: 474 - DNA, 401 bp, Homo sapiens
gcccagggcaagtcaggacataaaagtaaaaataagccctgtgctctgaagccactgaggctttgacaacaaagctgatgagatggcaggtcacaggtaaggagacctgagtgtagaagattttaaagagcatgcctttcaaagtaaagggaacagaggaagaaaatgatttttgtaattacaatttaaaaatactgattwaaaaaaacaaaataacttagcatgggttaaagagagacaagatttacagcactgggaaaaccaaggagaacccgtgcaaagtgttgtcatgggattaagctattgagataagccctttccagctcgaatagaatgtattagtttgaaagcaaagtgggctttgtctctgccacttggtccatttgatttttattttctgg

SEQ ID NO: 475 - DNA, 401 bp, Homo sapiens
aaaacagtaacttatttgattacattgctcagccactataagattccttcatgtttttccctatttttgaaaacgttttctcacctcagctaaacaaaaccggtcttttcagtttatggctacaaacaacagctcgtattgttttagtaccttccacagttaagaaatgaatttagcaatcatccagttaattcccaactytctgcccattttatggatgagcaaagtaagccctagagtgctgaaggacctggctcaagagcacagctaccaggtggcaggttgcaggacagaaaacccagctgttgagccaagtagacccacatttgaatctatctccactattcattacctgtatgaagggaccgtagcttctgtatctgcaacaaacaagactattt

SEQ ID NO: 476 - DNA, 401 bp, Homo sapiens
tatctccactattcattacctgtatgaagggaccgtagcttctgtatctgcaacaaacaagactatttcctttgactgaacctcagtttcctcatctataatatggggaaaagttcatgaattccgtaaacatttataatggagaagcactatcctggaatctagggatgtagatacaataaaataaaaaaaaaagacacrtggaatttactcttttgataaattggtaactatgaatctcatcaaaagaaagcagaacgcagatattctgagtagggggtttgggggagaaataagagtgattcctcctatctgctgctagggccataaagacactacaccaagaggaagtgtaggcttggccaggtccctgttccaggccctgttgaaaaggctgttag

SEQ ID NO: 477 - DNA, 401 bp, Homo sapiens
aagcagagtatttcaaactgttttatcatgaattgacaatctataattgtataaatttatggggtacaacatgatgttataatttatgagtgtgatgtggaataactatatcaagctaattaatattttcattacctcaaatacttaacattttttgtagtgagaacatttgaaatgcactcttagcaaatttgaaatgtrcaattctctattattaactatgttcaacacacggtccaatagaactcaaaaaagaataaatcacatcattcatgtctcacagattttataccctttaatcattaattctccattcccccagcctctgtaaccagcattctactctgtttctatgagtttgttttagattctacatttaggtgagaagatgtggtatttgt

SEQ ID NO: 478 - DNA, 401 bp, Homo sapiens
agagctcagatggggaagtactaatgtgtctttatgactccagagcccaaacgcctcgcccttacattagaaccctcaaacttattcagctggaattgcctcatctatacactgggaattatatttgccttttaacttaattatacataaattagctggcatactgtagacacccaatatcagtgtctctttatcaatgtmacgtatgcatgatgtcatggaattagcacataatgctgatccgctactcctagtgacaaatccaaatgtctgaatatgtctctgtaatcaaggttttattttgcttcatttttaagccacaattttgagtaaaattcttctacctcttgataaacaagcagtgagtggtggcatgtgcagagagatggaaggagttacca

SEQ ID NO: 479 - DNA, 401 bp, Homo sapiens
gctcagatggggaagtactaatgtgtctttatgactccagagcccaaacgcctcgcccttacattagaaccctcaaacttattcagctggaattgcctcatctatacactgggaattatatttgccttttaacttaattatacataaattagctggcatactgtagacacccaatatcagtgtctctttatcaatgtaacrtatgcatgatgtcatggaattagcacataatgctgatccgctactcctagtgacaaatccaaatgtctgaatatgtctctgtaatcaaggttttattttgcttcatttttaagccacaattttgagtaaaattcttctacctcttgataaacaagcagtgagtggtggcatgtgcagagagatggaaggagttaccagtg

SEQ ID NO: 480 - DNA, 401 bp, Homo sapiens
aagtcataaggggtctcagtggtatcatttttaagaagacaatcaaggacttagaatcccaatctgcccatcttctctaacctcatctgtcaaatattagttttaagtgacaggatttcttaatcctttccagttttatatatctatgagtggggagggagagaagatagagtaaaagaagaaggacaaggaaaggaagaygcaggaaggagcttcctttgatgcctttcagagattctatttgccctgagaatggctaattgcattttcagccttctatgactgattgagaagacccagaatttctcctggtccacagtttctccaccttgaagaaaatgactgtgagacctcaaagagccattctgggtgtaatgataacaaacagagggggaatgcca

SEQ ID NO: 481 - DNA, 401 bp, Homo sapiens
agaatggctaattgcattttcagccttctatgactgattgagaagacccagaatttctcctggtccacagtttctccaccttgaagaaaatgactgtgagacctcaaagagccattctgggtgtaatgataacaaacagagggggaatgccatgaggatttgagatgaaagatgcgatagatgtataagtactacataggyatgcaaaaaatgaacgaggcatgatgtctgcctgagaggccacacaagcagcagttagatatccagtgaaagatctccatgggcaggaaggcagatgacacctcaggtccaggagctgaagtgagcatcactcagttgacagaaagcatctagaatgtgtcagcgaaaggcactggaattatcattccttcttgagaagg

SEQ ID NO: 482 - DNA, 401 bp, Homo sapiens
tgactgtgagacctcaaagagccattctgggtgtaatgataacaaacagagggggaatgccatgaggatttgagatgaaagatgcgatagatgtataagtactacataggtatgcaaaaaatgaacgaggcatgatgtctgcctgagaggccacacaagcagcagttagatatccagtgaaagatctccatgggcaggaakgcagatgacacctcaggtccaggagctgaagtgagcatcactcagttgacagaaagcatctagaatgtgtcagcgaaaggcactggaattatcattccttcttgagaaggaaagaagaagaaagaagaaggaggaggaggagcaggaggaagaggagcaggaggagcaggacaaggaggaggaagtcttcttcccttgag

SEQ ID NO: 483 - DNA, 401 bp, Homo sapiens
agacctcaaagagccattctgggtgtaatgataacaaacagagggggaatgccatgaggatttgagatgaaagatgcgatagatgtataagtactacataggtatgcaaaaaatgaacgaggcatgatgtctgcctgagaggccacacaagcagcagttagatatccagtgaaagatctccatgggcaggaaggcagatgrcacctcaggtccaggagctgaagtgagcatcactcagttgacagaaagcatctagaatgtgtcagcgaaaggcactggaattatcattccttcttgagaaggaaagaagaagaaagaagaaggaggaggaggagcaggaggaagaggagcaggaggagcaggacaaggaggaggaagtcttcttcccttgaggaattctt

SEQ ID NO: 484 - DNA, 401 bp, Homo sapiens
ggcatgatgtctgcctgagaggccacacaagcagcagttagatatccagtgaaagatctccatgggcaggaaggcagatgacacctcaggtccaggagctgaagtgagcatcactcagttgacagaaagcatctagaatgtgtcagcgaaaggcactggaattatcattccttcttgagaaggaaagaagaagaaagaagraggaggaggaggagcaggaggaagaggagcaggaggagcaggacaaggaggaggaagtcttcttcccttgaggaattcttagtctcctgggaaagatagctctttatactgataatatgccacattttcttatgggtcttgatggacatgcacaaagtttaaaaatatcacaaaaaggagagatgattgagagtagctga

SEQ ID NO: 485 - DNA, 401 bp, Homo sapiens
catgatgtctgcctgagaggccacacaagcagcagttagatatccagtgaaagatctccatgggcaggaaggcagatgacacctcaggtccaggagctgaagtgagcatcactcagttgacagaaagcatctagaatgtgtcagcgaaaggcactggaattatcattccttcttgagaaggaaagaagaagaaagaagaargaggaggaggagcaggaggaagaggagcaggaggagcaggacaaggaggaggaagtcttcttcccttgaggaattcttagtctcctgggaaagatagctctttatactgataatatgccacattttcttatgggtcttgatggacatgcacaaagtttaaaaatatcacaaaaaggagagatgattgagagtagctgata

SEQ ID NO: 486 - DNA, 401 bp, Homo sapiens
gagaaatccatgacctccagccatcaaagcttcattcattcacaagtcctctctggatccatccactgcgaaaaggagcccaaagataatgaatttgtaaaattttcattttcaacccttaattacatggaatatattgagcttctagcatatagcttggcatatagtaggtgctcaataaataatattaaatttatattratataaagggaaaatagggaactacaaaaacgtttttgtcagtagcaattttcttgaggtattctttcttaatcagtcatactctcttgatatgaaatttaattccattcaacaagcatttgccgagtgtcagctgtgtttcaggcactcaggaagacaggcagagctgcctctcagctggtgcgcaccagaatgttcta

SEQ ID NO: 487 - DNA, 401 bp, Homo sapiens
ggaagacaggcagagctgcctctcagctggtgcgcaccagaatgttctaggaggcttccatcttggttggctggagagcatgattgccagttgtgaatgatgaatatctccctgagtccagagatgaatcagatcctgtccttgctctcaatgatttacaatcagctgggtcagttgtggatctttcttgcagcaggaagkttggagaccagccctgccactgaattactgcgtaactaggaacagccactgagccacttacaaatgagtttctccacatgtagtcagtaataatctcaccttcccacctcacagggattacaccagttactaagctattgtttctcatctccaaacccaccctcctataccctgcttggactttgaaaactgccctagtc

SEQ ID NO: 488 - DNA, 401 bp, Homo sapiens
tgttctaggaggcttccatcttggttggctggagagcatgattgccagttgtgaatgatgaatatctccctgagtccagagatgaatcagatcctgtccttgctctcaatgatttacaatcagctgggtcagttgtggatctttcttgcagcaggaagtttggagaccagccctgccactgaattactgcgtaactaggamcagccactgagccacttacaaatgagtttctccacatgtagtcagtaataatctcaccttcccacctcacagggattacaccagttactaagctattgtttctcatctccaaacccaccctcctataccctgcttggactttgaaaactgccctagtcctgagctgcttggccccctgttctgttctgccaaactggaag

SEQ ID NO: 489 - DNA, 401 bp, Homo sapiens
aatacaaaattagccgggcatggtgacagatgcctgtaatcccagctattctggaggctaaagcaggagaatcgcttgaacccgggaggcagagcttgcagtgagctgatgtcatgcgactgcactccagcttgggtgacagagtgagaccccatctcaattaaaaaaaaaaaaaaggaagaacttgtttttgctgcactrtttgctattcctataagtgtcatcctggaacagtcttcatctagtggcaacagatgattctagttttctgcttttttccactctcagaccagcctcatcatgcccctggagaggtaccagtgccaactggcagggcagcaccttctcttcaccagtagggatcccatcttcataggttctcttttccaaatgtcttgaat

SEQ ID NO: 490 - DNA, 401 bp, Homo sapiens
agggcattggaggggtgtgtggagtaaggggcaaatttgaatgagataacatatgtaaaattactttgaaacatatagaatcttgatagaaaatctaggtattattcttgtttcccttcatttcttgccactatgctaacagtagccacatcccaagtaggcaggcatccatgtcaacttcaggctctagatcttgcatamttttctctattcctcctggaacacatttgcagacatttaaacattttcaaattctatcttgttcagtcaatctcttttctaataattatatcgttatacagtctgggcattaactccttccagagctcaagccctgtttagggaagcttattggccagtgattgttagatctccaaatgacttcttggacaagatttgga

SEQ ID NO: 491 - DNA, 401 bp, Homo sapiens
ttcccaaagtctttcattttaatgaacagactggcctttttcagaagccaagggattgttatgtccatattacaagagagaaaattgagacccaaaggcagggaatgatttgagcatgttcacaaggctaaaataataaagttgggactggaatcagatgtgtccaactatatagttcattctatcctggaccacagagtrgtagtaagatggccaggatttgctgttggggatggggaagagttgtgttcaggaaggagttaggggtcctgcactcaagctaatgaaggacaatagggcaaagttctgagcccctccctaggcccatggtgggacagtttatcctcattttgaatctgtatctagatgcctccttgcttacagccttcctctgtcaaagg

SEQ ID NO: 492 - DNA, 401 bp, Homo sapiens
tgtttccttccttctctttcttttcctgatgcactttatggaatccattgtccttgtcatctctactcatcgccttaatttatttataaaggtacccactaagaagggcctccttctcatcctttccccttttctatcctttggtcctatccctccatgtgcctgtgttagctgcaggggaaaataaataaacctgcccayattatgtacatagggaattaaaattcaacatcttttctttttacctatgacaaaacactttaattatactgaagcaaggtgagtgctgaaggcaaaaccatatcgacagaaaccagagcaaacacactcttttcccaagctagacagagtaggaaacagctttccataaagcaagggcatggggatggaagacagcaaga

SEQ ID NO: 493 - DNA, 401 bp, Homo sapiens
gtttccttccttctctttcttttcctgatgcactttatggaatccattgtccttgtcatctctactcatcgccttaatttatttataaaggtacccactaagaagggcctccttctcatcctttccccttttctatcctttggtcctatccctccatgtgcctgtgttagctgcaggggaaaataaataaacctgcccacwttatgtacatagggaattaaaattcaacatcttttctttttacctatgacaaaacactttaattatactgaagcaaggtgagtgctgaaggcaaaaccatatcgacagaaaccagagcaaacacactcttttcccaagctagacagagtaggaaacagctttccataaagcaagggcatggggatggaagacagcaagac

SEQ ID NO: 494 - DNA, 401 bp, Homo sapiens
ttatttttgtccctgattgcccttttaaacctactagtgaggataatctttcccctgccactgggtgaaaattcaggttgttccaaggctttttggatcacttttacaagtcttgaatgcctaatctccaatcataaatcaaaatattcagtttaatacatgaatgaaaactcctatctatattcaagaataagaccttcstttcccctggtccacccaaactgctagagcctgtggtaggcaggtagcccgccttggggaagaatcatgtctcacgttctcacgtgcgactttctccactgactaattactgtttctgatcctcattttcattcagatcagggtggacgaggggagaaaaagaggtaagggaaataagaaagtccttactttcttatttg

SEQ ID NO: 495 - DNA, 401 bp, Homo sapiens
caacaggccccagtgtgtgatgttcccctccctgtgtccatgtgttatcattgttaaactcccacttatgagtgagaacatgcagtgtttggttttctgttcctgtgttagtttgctgagaatgatggtttcaagcttcatccatgtccctgcaaaggacaatgaactcatccttttttatggctgcatagtattccatgrtgtatatgtactacattttctttatccagtctatcattgatgggcatttgggttggttccaagtctttgctattgtgaacagtgctgcaagaaacatacgtgtccatgtgtctttaaagtagaatgatttataatcctttgggtatatacccagtaatgggattgttgggtgaaatggtatttctgattccagatccttg

SEQ ID NO: 496 - DNA, 401 bp, Homo sapiens
aacttttggattgctgcagctggttgcaacttgggtcttactgatacagaccaagcagaaataacctagcaactggatacccagcttaggcccaaaggagggtacacaaagcagaagtgtgggttctgagccaggcaccttctccccacagcagcatgtaagcatttaataatgggaggacaggagtaaaatgggggaagygtgggaaggcgaatgtggtgcccagatagtaatatgtagtgtatgatatgtatagtgagtgaggaagcacctggattcagagttccaatctcagttacaccacctaactagcggtgatcctttaagttacttaacctctctgtggctcagttgtcttatctataaaatgggactaataatagtttctccctcacagggct

SEQ ID NO: 497 - DNA, 401 bp, Homo sapiens
cgagtaacccaaattacggtggaacagactcccaaccactttactgcagaaattaaaatttccagggctgtcttgtatatgtgaaagaacagaatgctcatatttgtctcctcctgcctccgggtcactactgggtatccttgagagacaactgctccagtgggcacagactccaagctttccactggtagccacagctgstactgccctgtctggccttggaagattcctcagctcactccttccttgcttcataccaggcatgcaccatgtcttcctctttaactccacacagcagaagagagaaccaaatgtaattgtttcttaagtttttttttaaaggctcagggacactaacaacaggataaccatgatctctactctggccttccctggccagc

SEQ ID NO: 498 - DNA, 401 bp, Homo sapiens
ccaggtactgtatcctctcttatatactcaaaggttttgcatttcgaataatctcataggtctcgtatcaatcgttcctccctcttattagtgtacatataggtgcatacgtctgaatgtttggaaaggcaggggaaaaaatcagtatctcctactacagataagatcaataaagcccctttaaatctaagcgaaattttmaagtttcaaaatagacttctaacttttctaattttgtgttacataatttttacctgttaaatcagcgatttttccctcttgttagatcattctaattaaaatataaatatactgatatataaatatatccttctatcttaaaagaaaaaaaaaaacttccttaacctcatgccccccttcaacaactgccttagtttttt

SEQ ID NO: 499 - DNA, 401 bp, Homo sapiens
tactgtatcctctcttatatactcaaaggttttgcatttcgaataatctcataggtctcgtatcaatcgttcctccctcttattagtgtacatataggtgcatacgtctgaatgtttggaaaggcaggggaaaaaatcagtatctcctactacagataagatcaataaagcccctttaaatctaagcgaaattttcaagtktcaaaatagacttctaacttttctaattttgtgttacataatttttacctgttaaatcagcgatttttccctcttgttagatcattctaattaaaatataaatatactgatatataaatatatccttctatcttaaaagaaaaaaaaaaacttccttaacctcatgccccccttcaacaactgccttagttttttctctt

SEQ ID NO: 500 - DNA, 401 bp, Homo sapiens
tgggaaatttcagaacttccagatgaagtgaaagccctaatggtgttgggtgggtggagtgggtaacgtttaaagggatgagaactgggctggggtgcagtgactcatgcctgtaatcccagcgctttgggaggcccaggtgggaggatcacttgaggccaggactttgagagaagcctgggcaatatagtgagaccccayctcaaccaaaaaattaaaaattaaccaggtatggtgtcacacgcctgcaatcacagctactcaggaggctgaggcaggaggatcacttaagcccaggactttgaggctatagtatactatgatcgtgccaccgcactccagcctgaacaacagagctagaccttgtcaaaataaatttaatttaattaataaattaaatt

SEQ ID NO: 501 - DNA, 401 bp, Homo sapiens
agtgaaagccctaatggtgttgggtgggtggagtgggtaacgtttaaagggatgagaactgggctggggtgcagtgactcatgcctgtaatcccagcgctttgggaggcccaggtgggaggatcacttgaggccaggactttgagagaagcctgggcaatatagtgagaccccacctcaaccaaaaaattaaaaattaacyaggtatggtgtcacacgcctgcaatcacagctactcaggaggctgaggcaggaggatcacttaagcccaggactttgaggctatagtatactatgatcgtgccaccgcactccagcctgaacaacagagctagaccttgtcaaaataaatttaatttaattaataaattaaattaagtgatgagaactggagtggcatca

SEQ ID NO: 502 - DNA, 401 bp, Homo sapiens
gggcaagatgacaaaaccccatctctaaaaataaaaacaaaattagcaaggcacagtggcacgtgtgcctgtagtcccagctacctgggaggctaaagtaggagtaacccctgggcccaggagtttgaggctgcagtgagctgtgatcacaccactgcactccagcacctgggtgaaaaagcaagaccttgactctatttwaaaaaaaaaaaaaaaaaaaaaaaaaaaaaaaaaaagctaacacatgctggagattaaaggagaaaaaccttcaaaattctgtgggaaattcattttcaaactatattcttattcccagtcttaccattcaacaagcaagagagcagagcaaagacatttttagacatgcaaaaactagaaaacattttgttccagttgtc

SEQ ID NO: 503 - DNA, 401 bp, Homo sapiens
gaacatgggaaaggaattaagtatgtaaacagagagaattctgcagtgaaaacatgaggcaaattatgactataataaaaaaaatatatatgatctagggttgggcacggtggctcacacctgtaatcccagcagtttggaaagccaaagtgggcagatcacttgagttcaggaatttgagaccagcctgggcaacgtgcrgaaaccaggtctctacaaaaaataaaaaaattagctgggcatggtggtgcgcacccacagtgccagccacttgggaggctaaggtgggagaatcgcttgagcccgggaagtcaaggctgcagtgagctgtgattgcaccactgcaatccagcctgggtgacagagtgagagcctgtctcaaaaaaaaaaaaggggggggt

SEQ ID NO: 504 - DNA, 401 bp, Homo sapiens
attcgaagaaaaaggagtgtgattaattagccatgaagtgacctattaatcagatgcttgctgcctgtgggacagataaccagatcaggctgggccgtcattcactctgaaagtgggagtctggtccctaagccctgggccacttctctcctggctttgctgcctgcataaccaggccagttcactgtcacttttggtcarggagtgggtatgagttacccccatctgtcctggggccccagggttggctgttcccagaaagcctgatttactctgctgagatgtgaagcctccattcccttgtatttaaagcctacaactgacctggccctcagaagccattttcctccatagcttcaaacatcactgccagttcatttgacaatatttgttgcttctca

SEQ ID NO: 505 - DNA, 401 bp, Homo sapiens
cccccctgggatccctgtgccagccccgtgctgagaagcaacaaatattgtcaaatgaactggcagtgatgtttgaagctatggaggaaaatggcttctgagggccaggtcagttgtaggctttaaatacaagggaatggaggcttcacatctcagcagagtaaatcaggctttctgggaacagccaaccctggggccccrggacagatgggggtaactcatacccactccttgaccaaaagtgacagtgaactggcctggttatgcaggcagcaaagccaggagagaagtggcccagggcttagggaccagactcccactttcagagtgaatgacggcccagcctgatctggttatctgtcccacaggcagcaagcatctgattaataggtcacttcatg

SEQ ID NO: 506 - DNA, 401 bp, Homo sapiens
ttcagcccctctatcttggggcagatagcagggcctaaatgatcaaggccatgcccgcttccccagcttgggggcaatcctgagcccccctgggatccctgtgccagccccgtgctgagaagcaacaaatattgtcaaatgaactggcagtgatgtttgaagctatggaggaaaatggcttctgagggccaggtcagttgyaggctttaaatacaagggaatggaggcttcacatctcagcagagtaaatcaggctttctgggaacagccaaccctggggccccaggacagatgggggtaactcatacccactccttgaccaaaagtgacagtgaactggcctggttatgcaggcagcaaagccaggagagaagtggcccagggcttagggaccagactcc

SEQ ID NO: 507 - DNA, 401 bp, Homo sapiens
taccggaaactaccatttgtgtaaaaaggtaggagatatatatgcaaatgagcttttatatgcacagaaccttctagaataacacacaggaaccaagacactgagagatacagacaggggtaggaaggtaggaaggtggtttacttctcagtgtacatccacttgaactgtttggccttttaacatgcacataaaattttwaaaaaaataagtgttggtgaggatgtggagaaattggaacccttgtgcactgccagtaggaatgtaaaatgtaaaatgttgcggccactgtggaaactaatttggcggttcctcaaaaacttaaattagtattaccatatgttccagcaattccactttgggtgtattcccaaaagaattgaaagcagagactcaaacag

SEQ ID NO: 508 - DNA, 401 bp, Homo sapiens
ttccactttgggtgtattcccaaaagaattgaaagcagagactcaaacagatttgtacaccactattcatagttgcactatttacagcagtcaaaaggtagaagcaacaaagcatccaccgacggatgaatggatcaacaaaatgcgcctgtccgtgcaatggaatatgattcagccttaaaagggaacgaaattctgacrcatgctacaacatggatgaaacttaaaataagccagatacaaaaggacagatattatatgattccacttgtacgaagtacacagagtagtcaaattcatagagatagaaagcaaatggtgggggtcaggggctggggaggaggaatggggagctattgtttaacggggatggggtttgcaagatgaaaagacttccgtgg

SEQ ID NO: 509 - DNA, 401 bp, Homo sapiens
ggtcaggggctggggaggaggaatggggagctattgtttaacggggatggggtttgcaagatgaaaagacttccgtggatggacagtggtgcggctgcacaacaatgtgaatgtatttaatgccactgaattatacattttaaatggttaagatggtaaatattatgttttgtatatttcactgcaataaaaagtctttcrctgatacattttctgagcaattctggaagccagctaggagctctgctccagggaagccacccgtctgaggcagcccagtctccatggcagaaggatggactccttcttcccccaaagccaagacttatgattctgggaacccatagcttccaccacagaaaagccgctgccccctctgtgaggcctaagacctggccact

SEQ ID NO: 510 - DNA, 401 bp, Homo sapiens
cagatgctgtttcattgtctccttgtctgcagagtttttgaggacgtggccattcttgcttctgtttccctttacctcgcattctcagccatttcattaggatgtgcctttgctagttgtctcaggctggcttccctggaagcagatgaaggagtggagtctggggcaccaggtgtttcacacttgtgacaggaggaggcrgaagcaggcttggcagtggagttcaacctcggtcaggcctgcccacctctgcccacctgttggggactccagagcaaggccttccatcagcatgttctgtgctgagctgaaatggccagatcttcacattccctgcctgctcagtcacctgggctgtctgggaaggtgtggcctttagccagtggctctctctgcaggtg

SEQ ID NO: 511 - DNA, 401 bp, Homo sapiens
tgagaatgcgaggtaaagggaaacagaagcaagaatggccacgtcctcaaaaactctgcagacaaggagacaatgaaacagcatctgcaagaaaaagccggggatctacaaatctatatcctgcaaccaaagaagacaaaatagagacttttccaaacaaaccaaagctagagattttgccagcggcagacctgcaatackggaaatgttgacaggagttcttcacaccaaaggcgaatgatatcggatgaaaagcctggaactacaggagagaatgaagagtttgggaaatggaaaatgcatcactcatatgaaaacccttttctcattttgaatctctttggaacataattggctctggaaggtaaaactgttaacaatttgttgttgaaggccaggtg

SEQ ID NO: 512 - DNA, 401 bp, Homo sapiens
ggaaatgttgacaggagttcttcacaccaaaggcgaatgatatcggatgaaaagcctggaactacaggagagaatgaagagtttgggaaatggaaaatgcatcactcatatgaaaacccttttctcattttgaatctctttggaacataattggctctggaaggtaaaactgttaacaatttgttgttgaaggccaggtgyggtggctcacgcctgtaatcccaacactttgggaggctgaggcgggcagatcacaaggtcaggagttcgagaccagcctgaccaacataataaaaccccatctctactaaaaatacaaaaattagccgggcgtggtggcacgtgcttgtaatcccagctactcgggaggctgaggcaggagaatcacttcaacgcgggag

SEQ ID NO: 513 - DNA, 401 bp, Homo sapiens
ggaaaatgcatcactcatatgaaaacccttttctcattttgaatctctttggaacataattggctctggaaggtaaaactgttaacaatttgttgttgaaggccaggtgcggtggctcacgcctgtaatcccaacactttgggaggctgaggcgggcagatcacaaggtcaggagttcgagaccagcctgaccaacataawaaaaccccatctctactaaaaatacaaaaattagccgggcgtggtggcacgtgcttgtaatcccagctactcgggaggctgaggcaggagaatcacttcaacgcgggaggcagaggttgcagtgaaccaagatcgcgccactgcactccagcctgggcgacagagtgagactccgtctcaaaaaagagcaggatggcagg

SEQ ID NO: 514 - DNA, 401 bp, Homo sapiens
atctctttggaacataattggctctggaaggtaaaactgttaacaatttgttgttgaaggccaggtgcggtggctcacgcctgtaatcccaacactttgggaggctgaggcgggcagatcacaaggtcaggagttcgagaccagcctgaccaacataataaaaccccatctctactaaaaatacaaaaattagccgggcgyggtggcacgtgcttgtaatcccagctactcgggaggctgaggcaggagaatcacttcaacgcgggaggcagaggttgcagtgaaccaagatcgcgccactgcactccagcctgggcgacagagtgagactccgtctcaaaaaagagcaggatggcaggtataaatacagacataaggatacctgcattcagtataaataa

SEQ ID NO: 515 - DNA, 401 bp, Homo sapiens
ttcgagaccagcctgaccaacataataaaaccccatctctactaaaaatacaaaaattagccgggcgtggtggcacgtgcttgtaatcccagctactcgggaggctgaggcaggagaatcacttcaacgcgggaggcagaggttgcagtgaaccaagatcgcgccactgcactccagcctgggcgacagagtgagactccrtctcaaaaaagagcaggatggcaggtataaatacagacataaggatacctgcattcagtataaataatcgagggacttggaaaatcagatatcagactggacaaaaaaagtgagacttacctgtatgctctctaccagaaacttactttaaatataaagacacaaataaactataaaaagatagaaaagatatatcatgc

SEQ ID NO: 516 - DNA, 401 bp, Homo sapiens
tctctactaaaaatacaaaaattagccgggcgtggtggcacgtgcttgtaatcccagctactcgggaggctgaggcaggagaatcacttcaacgcgggaggcagaggttgcagtgaaccaagatcgcgccactgcactccagcctgggcgacagagtgagactccgtctcaaaaaagagcaggatggcaggtataaatacwgacataaggatacctgcattcagtataaataatcgagggacttggaaaatcagatatcagactggacaaaaaaagtgagacttacctgtatgctctctaccagaaacttactttaaatataaagacacaaataaactataaaaagatagaaaagatatatcatgcaagcactagtcattttttcaaaagccggagtgcct

SEQ ID NO: 517 - DNA, 401 bp, Homo sapiens
ctcgggaggctgaggcaggagaatcacttcaacgcgggaggcagaggttgcagtgaaccaagatcgcgccactgcactccagcctgggcgacagagtgagactccgtctcaaaaaagagcaggatggcaggtataaatacagacataaggatacctgcattcagtataaataatcgagggacttggaaaatcagatatcasactggacaaaaaaagtgagacttacctgtatgctctctaccagaaacttactttaaatataaagacacaaataaactataaaaagatagaaaagatatatcatgcaagcactagtcattttttcaaaagccggagtgcctatattcttgtcggacaaagtagacttcagggcaaacattaccagggatagagatgtttct

SEQ ID NO: 518 - DNA, 401 bp, Homo sapiens
aatataaagacacaaataaactataaaaagatagaaaagatatatcatgcaagcactagtcattttttcaaaagccggagtgcctatattcttgtcggacaaagtagacttcagggcaaacattaccagggatagagatgtttcttaatgataaaggtgtgaatttatcacaaagacatcataatcctaaatgtgcatctrcctaatcacaaagcttcaaaacgcatgaaacaaaaactgacaaacccacaattctcatgtgtgattctcacgcagaattgaaaggaaaaacagacaaatccacaattctcatgcatgattcccacactcctcttccaataaggacacagaagactcgaacacggtcagccaatttaaccatctcacgcttaacaatggca

SEQ ID NO: 519 - DNA, 401 bp, Homo sapiens
aatgacccactagtaaatgaaatttaaaacttttagcccttagatggaatcaaaaacacaaaaaataataagggatacatttaacaacatatgagcaagaactattcactgaaaactgcaaggtattactgacagtgatttctaagggcccaaatagagagacacgccatgttcatggactggaagacttgaacatgggtrggtgcaggtgaaacaggactggccaaggatgatgactttaggggccagatgctgggtacacgcattatacagtccctctacttctatgtacatttgaaattttcagtagaataaaaggagcataaaatataacctccacatcacattgggcaccttctcctcctcataagcactctctgcagctgcgtagactgcctcgt

SEQ ID NO: 520 - DNA, 401 bp, Homo sapiens
ctagtaaatgaaatttaaaacttttagcccttagatggaatcaaaaacacaaaaaataataagggatacatttaacaacatatgagcaagaactattcactgaaaactgcaaggtattactgacagtgatttctaagggcccaaatagagagacacgccatgttcatggactggaagacttgaacatgggtgggtgcaggygaaacaggactggccaaggatgatgactttaggggccagatgctgggtacacgcattatacagtccctctacttctatgtacatttgaaattttcagtagaataaaaggagcataaaatataacctccacatcacattgggcaccttctcctcctcataagcactctctgcagctgcgtagactgcctcgtggattcatg

SEQ ID NO: 521 - DNA, 401 bp, Homo sapiens
tgaacatgggtgggtgcaggtgaaacaggactggccaaggatgatgactttaggggccagatgctgggtacacgcattatacagtccctctacttctatgtacatttgaaattttcagtagaataaaaggagcataaaatataacctccacatcacattgggcaccttctcctcctcataagcactctctgcagctgcgtrgactgcctcgtggattcatgtgggttcttggaatccggccacattcagagacgtgtgaggcagggtggttggggattgaggttctcagtcaggcaactcaccctctctgtgcctcaacttcctcatctgtgacatagagctgccttctagtgttgttgtgaggactcaaagggtcctacaccagagcacatgggctggct

SEQ ID NO: 522 - DNA, 401 bp, Homo sapiens
aaggatgatgactttaggggccagatgctgggtacacgcattatacagtccctctacttctatgtacatttgaaattttcagtagaataaaaggagcataaaatataacctccacatcacattgggcaccttctcctcctcataagcactctctgcagctgcgtagactgcctcgtggattcatgtgggttcttggaatcyggccacattcagagacgtgtgaggcagggtggttggggattgaggttctcagtcaggcaactcaccctctctgtgcctcaacttcctcatctgtgacatagagctgccttctagtgttgttgtgaggactcaaagggtcctacaccagagcacatgggctggctcctggagaggggagctgacggtgcatgctgacatgc

SEQ ID NO: 523 - DNA, 401 bp, Homo sapiens
cagaactctaagaggcagttctaacaataattccaagtcacaagtgaggagacagaggcacagagagatcacgtcccttgcccaagatgcacagctagtcactgctggagccgggattcaaactctgggatcggagtcctgacccaccacactatgccacgcccatatgttcattggaagccatgcctgggtctgtcccargagatcccatttcgaggtttctgaccccaagatggcattgcccaaggcaaacattccaatattattattattattattattattattattattattattattattttagacagagtttcgctctgtccccaggctggagtgcagtggtgcgatcttcactcattgcaacctccgcctcccgggttcaagcaattctcctg

SEQ ID NO: 524 - DNA, 401 bp, Homo sapiens
gtgttgacaatgaattcttacaaatttaatactacacagccctcttgccacatttggcctacggggtatcagtttgcagccctgggaaggatgaagcgagggagaggaaggtagtgcaggctccttcccagggagtggggacacagaaaaaggggcaagcagccccatttgtttgcgtttccatacagtaagcaaacctasaaaggaatgggccatcccctgttgctgggtcaggaagcagggatcacaaatgccggaaaaaagaaaaaagaaaaaaaaaacacctaggcacaacctgggctttctgccctctggcagtagggatggggttgagaggcagaggaccaacgctgtcactgtgattcccaggcgcactgaggggaggggcaccccctggcgac

SEQ ID NO: 525 - DNA, 401 bp, Homo sapiens
acagcacgtctcacttcagatgaaccacatctcaagagctcagtcccctatggaccaacactcacattgtccccagttcccctctaaacaatgcagcaataacatgctcacacatgcctcctggaaggctagggtgtgaattcgtttctctcctgggtacgtccccagggcagtggtggctggctcagacttaattggccrtggtttgccagctccctctgtaggatggctgcgctggccacacttgccctcaagacacaagggtccactggctccacacctttccactttctgcattacccacctttttttttttttttttttgagacagagtctcactctgtcgcccaggctggagtgcagcggcaccatctcggctcaccgcaagctccgcctcccgg

SEQ ID NO: 526 - DNA, 401 bp, Homo sapiens
aagggtccactggctccacacctttccactttctgcattacccacctttttttttttttttttttgagacagagtctcactctgtcgcccaggctggagtgcagcggcaccatctcggctcaccgcaagctccgcctcccgggttcacgccattctcctgccccagcctcccgagtagctgggactacaggtgcccgccamcgcgcccagctttttttttttttttttttttttttttgtatttttagtagagacagggtttcactgtgttagccaggatggtctcgatcttcggacctcgtgatctgcccgcctcagcctcccaaagtgctgggattacaggcatgagccaccgcgccggccattacccacctttctaatgttagtcaataggatagctg

SEQ ID NO: 527 - DNA, 401 bp, Homo sapiens
tttgggctgagctacctttgaaagaatttgtccagcctaaatgagcatcaataacagattagctaaataagtcacgttgtcctaattcacagactattgtagacctgttaaaaagaatggaacaaggctgggtgaagtggctcacgcctgtaatcgcagtgctttgggaagccaagacgggcagatcacttgagcccaggygttcacgaccagcctgggcaatatggtgaaacctcatctctataaaaaatacaaaaattagcccagtacggtggcacatgcctgtagttccagctacttgggaggctgaggcaggaccacacccagtaccacctgctctgccaggcactcactgtgtgaccttggttctgcctgtgcctcagtctcctcctctgcaaaac

SEQ ID NO: 528 - DNA, 401 bp, Homo sapiens
gaggctgaggcaggaccacacccagtaccacctgctctgccaggcactcactgtgtgaccttggttctgcctgtgcctcagtctcctcctctgcaaaacaaaaaagggatgaggagagtctcacagattgttgtggagaagaggcatttggagatgcacagagagcagcatccagtcacctgcgtgccccagctcggctcygatgccagcactcgctcctctttgccatacacctttgctgcgcatctaccaaattccaggcactgctccggagtctctcggaacacagaggtgaagtgcaaggaaaaataataatcatcatatgattattaaccctagagaaaataaaatgctacataggagagggaaggtaaccatagattaccatatggcacagctgt

SEQ ID NO: 529 - DNA, 401 bp, Homo sapiens
gttagggatgaaatcttaggcgtgggaaacctccctgagtccgcctcagtctgggatcctctgacaggttttgcagccccgggctccttctctccgccttggaaacagccaggaggtggcgccggatctcccccatcctcaggagtgtgaggcccaggtgctcgcttcaggaagtaaacttcttgtcaaaagacaggaggmatttgggaaattagcacgtatggagtgggtggtgtctgccaggctatgaaagctctttttctttgcaatctctttagccgactgtctgtgatgcacactgctgtctagttgtagcaaaactaacttcctgttacctttgtggagaggttttctgggttgacagattttgtttttaatcattttcccaatgacatgtgtgt

SEQ ID NO: 530 - DNA, 401 bp, Homo sapiens
taaaaagccggttcagtgcacacctctaggactggtggaactgaagctggaatcggggatgggagggacaaaccagttttttcctatacactctgtgtagcaacagaactaagcacgtgcatgtgccttgcatcacagttcacttagcaacgagctgcatctatgactgtggtcccataagatgataatgggaccgggcgyggtggctcacgcctgtaatcccagcactttgggaggccgaggcgggtggatcacctgaggtcaggagttcaagaccagcctggccaacatggcaaaaccccgtctctactaaaaatacaaaaattagctgggtgtggtggcgtgagactgtaatcccagctactcgggagactgaggctggagaatcgcttgaacccggg

SEQ ID NO: 531 - DNA, 401 bp, Homo sapiens
tcactgctacactcccaccagcgccatgacaatttacagatgccatggcaacatcaggaagttatcctacatggtcgaaaaggggagacaagaataatccatcccttatttaccatatcatcaagaaataaccataaaaattggcaactagcagccctcagggctactctgcctacagagtggccattcttttgtttcttygcttctccaataaacttgctttcactttactctacagattcgcctcgagttctttcttgcccgagatccaagaatcctcacttggcatctggatcatgacccctttccagtaacattaccagtttatgtatttactgtattttactttttaatcattattttagagcatactcctacttattaaaaaaaaagttagtgat

SEQ ID NO: 532 - DNA, 401 bp, Homo sapiens
cataacccactgttctactgtttcccagtgggtttcaaaaccaaataagtacgtttacaatggtgatagtaacatcaataattaaagttatggtcaatctctcaaaattgagaaaatgaaccaaagtggtgaaactgttaaagcgaattaaatatggcctaagaaggactccgtacttgtctataaatttgttctgaccasgaggcacccctgtagtctctctgagcctgctgtgattctgggggctgcccgattgccattcattgctcaattaaactttaaatttaattcagctgaagtttttcttttggcagggatatgacacgtgactgtatcatcttacagaaaagacttcattctggatccctttgtagcgcctgctggaggattttctctacatc

SEQ ID NO: 533 - DNA, 401 bp, Homo sapiens
tgctgaagtcttaacccttagtacctcagaatgtgattgtattttggagatagggtttaaaggagtgactaagttaacatgaggctattagtgtgggtcctaatttaatatgactggtgtccctataagaaggggaaatttggacaccacagagaggtaccaggggcgcatgtgcacagagggaggaccatgtgaagaggyagcaagagggccatctgcaagccaaagacaggcctcagcagaaaccaaccccacagacaccttgatcatggatttcgagcccccagaactgtaagaaaataccccagccctagcaaacaaatataacctgggttaaatatgagtatactcaagagcaattcatatacagccaccacttacccctgcatggaacagcccag

SEQ ID NO: 534 - DNA, 401 bp, Homo sapiens
ttgccaaaacttgcagtggctggctgtggtcttggaaatttagatttggggaagcatttattgtcactatgtctgagccaggtcactaggctgtgtgtggtaaccaacattattctcataagatattcactactccttgctcagatagcttaacagcaacctcagctatcaagagtacagcctagaggaagtcaaaggagrtgcgctgtggctgcccagagctcatgccctttactcttcaaaaaattatttcagaaactatttgcttcatagaggcacagttgagtgtatgtatagattgttttctgagaaataatttgaatattatcaaattcacctatttaaagtgcacaattcagtggcttttagtatattcacacttttgtacaaacatcaccact

SEQ ID NO: 535 - DNA, 401 bp, Homo sapiens
cagcactttgggaggcccagacgggtggatcactggaggtcaggtgtttgagaccagcctggctagcatgatgaaaccccgtctctactaaaaatacaaagattagccaggtgtggtggcatgtgcctgtagtcccagctgcttgggaggctgaggcaggagaatcgcttgaacccaggtggcggaggttgcagtgagctraaatcatgccactgcactccagcctgggtaacagagcaagactccatctaaaaaaaaaaaaaaattacaggaccttcttcacagtgtcagtgtgaggacagtcagtgagtgcatgtggagtgggactgctggcacattccccagtgtgccatgtgcattgctgtctatgtggctggccccctggagctgtgcagctgccg

SEQ ID NO: 536 - DNA, 401 bp, Homo sapiens
tgaaagaaagcaaagagatatggagaaactgagtctgacaacagtttttgagccttgcctaaatccatctttgcctaaagctagatctaccctttgacttttcagttacaggagccaaaaaattccagtatattttttctcaagcgtgttcgaagtaattcttttgtcatgtacaattgaaagaggagttacaaaattaaygcaggcagttcttaaatccacataaccaccaagcattgtctacagatgatctgttcactattgttaatcctgtgtggtgggaatacagtgttcatcttattaatctttaaacttttctgtacttttaacctcattaagaagatcagagaggtaatgaaaacagcactgaaaaaaaacagatcagtttccagcacagaaaa

SEQ ID NO: 537 - DNA, 401 bp, Homo sapiens
cactgattgctttaggagaatcactagtttaaaatatttttattggactgggtgcagtggctcacaccagtaatcccagcacttcgggaggccaaggcaagaggatcacttgagcccaggagtgcaagaccagcctgggcaacatggcaaaaccctgtctctagaaaaaaatacagaaaaaaattagctaggcatggtggygcatgcctgtagtcccagctactggaaaggctgaggtgggaggatcccttgagcctgggaggtcgaggctgcagtgagctgagatctcaccactgcacttcagcctgggtgacgacagagtgagactctgtctcaaaaaataataaaatatttctattgtaagcacatacattaattcttcggaaaataggtatgcagtg

SEQ ID NO: 538 - DNA, 401 bp, Homo sapiens
gaggaccattctcaagagaagaagagtcctgtgaatgcccccagctttggatggagtatctgaacactgattcacccactgttgtgtggccgtatgactgtgtcctactttgcctgcatgtatagttagaggactgtgactccagttctggccagagggccaggaatgctgactcagtgcctgcctagaagtgtttttaamgaacacagttttgtcacttaatactgtcagtctctcacaaggtatttcaacctcagaatcttccgtctgtacaataattaatgtttgttaagccctctaaagccattaatgtagtgtaggcagcaggtattagtgaagacactcagtttcagaggcagaaaacctggaagagttcccactctactctttagtgacagagg

SEQ ID NO: 539 - DNA, 401 bp, Homo sapiens
aggaccattctcaagagaagaagagtcctgtgaatgcccccagctttggatggagtatctgaacactgattcacccactgttgtgtggccgtatgactgtgtcctactttgcctgcatgtatagttagaggactgtgactccagttctggccagagggccaggaatgctgactcagtgcctgcctagaagtgtttttaaakaacacagttttgtcacttaatactgtcagtctctcacaaggtatttcaacctcagaatcttccgtctgtacaataattaatgtttgttaagccctctaaagccattaatgtagtgtaggcagcaggtattagtgaagacactcagtttcagaggcagaaaacctggaagagttcccactctactctttagtgacagaggt

SEQ ID NO: 540 - DNA, 401 bp, Homo sapiens
tgtgcctggagatgttgcagcttggcttgggacaggggaggctgttgaatgagattctacaggcagagacagtaatcactgctgcttccctgggcagcaggaacaatgcagaactgggaattagtcccaaatttgaaaccgtggggaaacaggccagccttgtcacacaggaccaaaaggtggaaaggatgggaattgacraaagaccgccacagggtgagatgaggacatgatggccagttaggatatggtgtctctttcacagaagccacagcagaggaggtcagtggtcatattggttagatggtctgcctgacatgtcatctcggaatggtccaggaagatgtagcaggtggtcctagctatcacgtgttagaaacttgggaacagtgcttttgagt

SEQ ID NO: 541 - DNA, 401 bp, Homo sapiens
gctatcacgtgttagaaacttgggaacagtgcttttgagttctttagtttcaccttttcctagattcacttgctttttagtcatgggaggagtaaaagtgaaagttggaagatttgttctatgaaaggaaaatcagggagcagaacctactcctgacagcatccagagacacaatctggagatgtcacacctgcagcaccsaaactcaatgtcaggcacttggggtctggatggctcctgagctgaactacagatttgggccacctctctaggctcaccatccagatctgggtccagaggacagaattattacctttgggttaaagtgatcccttctcaagtttttatttaatgtgcttttaaaaggcaaaccccacataccatcagtttggttactcttc

SEQ ID NO: 542 - DNA, 401 bp, Homo sapiens
ctggagtgcattggcgccatctcggctcactgcaacctccgcctcccgggttcaagcagttctctgcctcagcctcctgagtatgggattacaggcgcccgccaccatgttcggctaatttttttgtattattagtagagacagggtttcaccatcttggccaggctggtcttgaactcctgaccttgtgatccgcccgcstcagtctcccaaagtgctgggattacaggcgtgagccaccacgcccgactcctatttgacttttttaaaagtgctcctcagagtactgataccatgaccccacactgcccacagagaccctgtctctggaagtaatgccagcttcctgccagtagaagcagcgtgagttgccaggcttccattatgggatggttatgctg

SEQ ID NO: 543 - DNA, 401 bp, Homo sapiens
tagatttgccagctctgagccccctcttcagtggatgacccctttcagctagagttcagcagagtctgcttttatttttataaattatcatcgttccacacctctggtggccactgactcatgtgcctaagaaatgagaccaattaattttaaaaagtggaatagtggttgggtgctgtggctcacacctgtaatcccaasactttgggagggtgaggcgggaggattgcttgaggtcaggagttcgagaccagactgggtaacatagtgagacccccaactgtacaaaaataaaaaataaaaaattagccaggcgtggtagcatgcctatagtcccagctattcggaagtctgagataggatcacttgagcccaggaggagaaggttgaggctgcagtga

SEQ ID NO: 544 - DNA, 401 bp, Homo sapiens
aaaagaagggacagagatgaaaggcagtttgatgtttgtgaaaggtatttatacgagctacatgcttttcccattccttctgctgagactaagccacattcttgcttaataaaaagctatctctttaggggctttgccagaatttgcagtcagatcattaagaattttttttttttttttttttttgagacggagtcttgstctgttgcccaggctggagtgcagtggcgcgatctcgactcgactcactgcaacctccgcctcccaggttcaagcgattctcctgcctcagcctcccgagtagatgggattacaggtgcctgtcaccacgcccggctaatttttttttatttttagtatagacagggtttcaccgtgttagccaggatggtctcgatctc

SEQ ID NO: 545 - DNA, 401 bp, Homo sapiens
gcctgcagcctgtaaccatcggctgggccctgcaaggcccacactcacgccctgtgggtgatggtcacggtgggtgggtgggggctgaccccagcttccaggggactgtcactgtggacgccaaaatggcataactgagataaggtgaataagtgacaaataaagccagttttttacaaggtacttgatcatgttctcttrattttaaattagattttattcccaaaaaggccagtgaggcgcaaagcttggttgcagctttgtgtgtgtcaaaggcttggttggggcactcaggcattttgcctggaaaagttcccttctgatggtcatgtcaacctggtgctcacatttgtgataaagtgatatgggtgctgggccacatgtggagctgctgcagggct

SEQ ID NO: 546 - DNA, 401 bp, Homo sapiens
ctggctcagcggaggcctctgcattctcacgggacagccagtgcactctgcctcacgggcagagccctgcagcagctccacatgtggcccagcacccatatcactttatcacaaatgtgagcaccaggttgacatgaccatcagaagggaacttttccaggcaaaatgcctgagtgccccaaccaagcctttgacacacayaaagctgcaaccaagctttgcgcctcactggcctttttgggaataaaatctaatttaaaatcaagagaacatgatcaagtaccttgtaaaaaactggctttatttgtcacttattcaccttatctcagttatgccattttggcgtccacagtgacagtcccctggaagctggggtcagcccccacccacccaccgtgacc

SEQ ID NO: 547 - DNA, 401 bp, Homo sapiens
ggccaacatgttgaaaccccgtctctactaaaaatacaaaaattagctgggcatggtggtgcacacctgtaatcccagctactcaggaggctgaggcatgagaatcacctgaactcgtgaggcagatgttgcagtgagctgagagtgtaccactgcactccaccctgggtgacagagtgagactctgttccaaaaagaaaraaaaaaaaaaaccaacttatttatcttggtaatcatcaatatcatagcaaaactgggaaggaggaaaaaaataactaaaatcatactcaaaaataatcatctagatatttgccaaacattcatatataaacaaattatatagtataatatacagtatatactatattatagtatatactaattatactctatagtataat

SEQ ID NO: 548 - DNA, 401 bp, Homo sapiens
taacaaagaattagtcatgtcaactggatttgttagtatctgaatatttggtttcaaaaacaagtaagcatgctaaaaatttaactttagtaaaaataaaatctacctgtttaaattctatccagttgaggtataaaaatgcatatttatgactgcaaaaataaaatgcaaacaaaatacatgctagcacaggatgaaccstgaaaacatgcaaagtgaaataagtcaccgacaaaagaacaaatattttctggtttctttataggaaatatctatagtaggcaaattcatagagacagaaattagccaggcctggtggtgtatgcctgtaatcccagctactccggaagctaaggcatgagaatcgcttgagcccaggaggaagaggttgcagtgagcca

SEQ ID NO: 549 - DNA, 401 bp, Homo sapiens
tggtggtgtatgcctgtaatcccagctactccggaagctaaggcatgagaatcgcttgagcccaggaggaagaggttgcagtgagccaagactatgccactgcactccagcctgggtgacagagtgagaccctatctcaaaaaaaaaaaaaaaaaaaaaaaaaaaaaaacacagaaataaatgagacgttaccaggatctraggggaggaagggttgggacttcatgcttaatggttacagagtttctgtttttgaggtgatgaaaaagttttggaaatagtggtgatggttttagaaatagtggcgatggtcatgccaccctgtgaatgtcattaatgccaatgaattgtatgcttaaaaatggttaaaatggcaaattttatgttacacacattttacc

SEQ ID NO: 550 - DNA, 401 bp, Homo sapiens
aatacaagtattaagttaactttagagaaaacttatctttttccagcaacgaatgtctttttaaaattaagaagaattataaagatgaaattctatcatgattcaaatctcagtatttggtgtgcctggaaccttcacattaagcaaaataaccttttaaaactacatttaatttttagttttttaattctatttaggccrtaagtgttttttaagtcttatttgagaattcttttggtaattttgaggaaatcctaagatctcaattttgccacattaaaatatcccaaggacaaaaatatccaaaattctacaccacccatgataaatcacaacaaacataaaaagtttaaagaagaaaaggttagagaaaaataaagtactcccaaatcaaacttcac

SEQ ID NO: 551 - DNA, 401 bp, Homo sapiens
gcagatttattcttgcatcttagaagttcatttctggctttggcctcagtctactattaattttaacattttaccattcagcaattgtccaaactcggccattagtgagcttcctccagatagacagtttggagctatgaagccacagacccaaatctccttggaatccaatacagcgtatctataaaagcaagacaaatrtacttctggaaaagtatcctatagatataccaccacatgtgcaacatggctgactcatttgtgactactttcctcttacaataactgtgacactgtggatgttttggaccaaattaactctttttgaagggctgtcctatgcactccaggatgttcagcagcatccttggcctctacccactagatgccagcagcacttc

SEQ ID NO: 552 - DNA, 401 bp, Homo sapiens
ctgtggatgttttggaccaaattaactctttttgaagggctgtcctatgcactccaggatgttcagcagcatccttggcctctacccactagatgccagcagcacttctgagtcatgttaagtaaaaatgtctccagacattgctacatgtccccagcggaacaaatttgcccctggttaagaatcactacataaatgctkctttatgtaatcctgtaactacagggacacggataacacaaagcttttctgctgacagaaagcacagtaaaaacacctctctgggtaatgtgatgggtaactcacctaatatccacttaaccttggctcagtggacacacagtaagagtgctaaaaagacagccatttgattttctgatgaggctgccaaaacaattcaa

SEQ ID NO: 553 - DNA, 401 bp, Homo sapiens
agttagggaggagccaggcaagaaggcaacagagctttgcctccctgtcatccatggatggacccttcccagaaggagcctggagcatcaagaggaccagggacaggtgcttcttctagaacggctcccacatcagctgtccacagggagaggtgacctaaaggacttgggggctgcttgtcaaggtcaggaggggctatraagaggcttcatgccttgctgggttctcagagatccctgaggccaagccatgtccacagagcagaccaggcaggggcatgaaatcagcttccaagagggcaatactctagggctggcctgggtgataactttgcactcactttttctactcttcacataattctgcaaaaaaggtgctgatattcccatttcctgatgag

SEQ ID NO: 554 - DNA, 401 bp, Homo sapiens
agctctagagatcagatgtggttctggggggtaaggaagccctgtagttcccctctaggggtggagtctgtgggaagcatatcagatggctattattgttggctattacttttttcattaccatgttgacattattatcaccactacaacaaatttcctactagaacatagtgccaaaattctcttccaaagcaaacaacygaatctgcgttacctgagccgacctgcctaaaaatccatgttctgagtgtcttccttccacttgagtaactacagtctagcaaggagtctccacaacctctagcagcccttgatcaaatcagcccagatggggctggggccaaatctcccgggtctcaggctgaccagagctttgtctccactgagcaggttctgagatc

SEQ ID NO: 555 - DNA, 401 bp, Homo sapiens
gtaactacagtctagcaaggagtctccacaacctctagcagcccttgatcaaatcagcccagatggggctggggccaaatctcccgggtctcaggctgaccagagctttgtctccactgagcaggttctgagatcaaggccacctttctgtgcaccttagtcctgagtgggatgggactgagagaccttacttctgagacragagatgccaggctctgcaggtatgggctgggctgggttccctactgtggagggagggaagcctattagcagagctccccagcagggggcaccatctgtccaaggctgagccctttcaccaactgcactgtcaggcttcagcctggcctagccaaggctaagcaagtccagacagccacaggcatgccaggcataccagc

SEQ ID NO: 556 - DNA, 401 bp, Homo sapiens
gggtcaacatctgcccttcccaaaggcaggccaaagggatgggaaagagtggagcgggaggatggaaagacaccagtgtggttcagaggtctgggatagaaagaaaatgctggggccgggcgtggtggttcatgcctgtaatcccagcactttgggaggctgaggcgggcagatcacgaggtcaggagatcaagaccatcytggctaacacggtgaaaccctgtctctactaaaaatacaaaaaaattagccaggcgtggtggtgggcaactgtagtcccagctactcgggaggctgaggcaggagaatggtgtgaacccgggaggtggagcttgcagtgagccgagatcgcgccactgcactccagcctgggcgacacagtgagactctgtccccaaaaa

SEQ ID NO: 557 - DNA, 401 bp, Homo sapiens
cctgtctttacgatgagggacaagttatgattccagtttccttatttgaaaaatgacgccaataatgcctacctctcagagcgcagatgaagactgaagacgttcatgtgtataatgtcatcaaaggctagccctgtctgatctcacctttgtacactccaattgaacgaccaaattgtagtatcacacccaaaagatcasgtgggagaccctcctcatgagtgacaggacagctgctgcctttggtgactagggaaatgaggccagaggcaagccacttggcacattttccctcaaaaacaacatgacctcccctcatccctgtcccacctcatggggtttggagagatcctgaggaacaaatgagcccagatggaagttaaaaaagccttgtggctggc

SEQ ID NO: 558 - DNA, 401 bp, Homo sapiens
atgtccagcatgtggacctcatcaacaaacagcacacccgggaccagctcagcaatgccctggtcgatgtacttgttcaccaccttattaatctcccctcgaagtttgtctaggagatgcaaggatgggcaggcaaggtcagcacagggctgggggagactatcgccttttctcctccacctgaattcaatccaaacccaygctaggagcctagttttcctactagctatgtgatcccagacagggtgtgtccccactccaggtttcagtgtcgtcatctgaacacagtgataatcacacctaaaaggtcacaaaattggcagcctcccccaaaagatgagtttggttaaatgtaaaaaggttgcacaggtgttctgcatgggaatcccttcacagcacac

SEQ ID NO: 559 - DNA, 401 bp, Homo sapiens
taactttcaatcaagtgcctggactaaggaagtgggtgcttttagaatcctgagcagaaacctttgaggaatgaaaggctctgaagaaaggcccaatctcagagctcctagagggatgagtctctcaaaagttacataacccagctaaggtctcagtgctcattttccaaaccagctcctgtgttatcatcaggagggagyagctcacaaatagaaaactggaagatctgaggcagcgtcttccaccaaaggcaagaggcggggattgtccaaagaggatgcacaccgaaaaccgtgtgaaaagaaagaaactgcttctgacaactcgaacagaaaggtctcagattgctgccctggcttaaactttaaagacaatatttgctttaatgtttaactaacat

SEQ ID NO: 560 - DNA, 401 bp, Homo sapiens
caggggagcagcagcagtgtcccctgtggagctctgggaagtgcccacaaactgggcagggcagtatgtggagctggtctgtggagctgccctgtgctctactagggagggggctgacagccccaaggctccagagcctgtgctccagcagagctgggcgacacaaatccctatttctggggcctcataggggccagaaaytgtgactgcagtggggcagatagcacacagtgtgctatatggctgcctaaatgccgccagaaacttaggctagagtcaagctctaagctatgaggaagaaagaactgttctgaggcatttcctcagggcgactgtgctcacagagccgcaagagcatctcagaatgtggggccctccgccctgccccttgctcacagggc

SEQ ID NO: 561 - DNA, 401 bp, Homo sapiens
agtgacaaattaaccaagctggtcagtgatggagcaacacagttcctgacttctgactcccagcccagcactcttctcaggtcaagggctcccaggaggtcagtttggggatggccatttcaccaaccaaggggacctgttggtccaagatgagtcttcagtaatctcttgaccaaagctccaaggaacaaaacacccacrgatcaaatttcaagtcagaaaacaaactattccctaatagtgactattcactatttcctagaaatgtcatatagtgataacatcctttcctgcactttactagccaaggcataagtatccatctgtatgagaagcagacaacagtaccagctcaaagctaaaacactgtggcttttgctaagcagggggaaagaaagagc

SEQ ID NO: 562 - DNA, 401 bp, Homo sapiens
cacccacggatcaaatttcaagtcagaaaacaaactattccctaatagtgactattcactatttcctagaaatgtcatatagtgataacatcctttcctgcactttactagccaaggcataagtatccatctgtatgagaagcagacaacagtaccagctcaaagctaaaacactgtggcttttgctaagcagggggaaasaaagagctttgttaggctttctgaaatcctgtaaagggctcatagaacactcctgccctcctgccattaacacccagaaaatcccaggtgtgagcccactgctggagtgaagccatggaggaagctggctagctcagggccagaggcttggctgggataagaaacaatacacatgaaatcatctgtgactagagcatttg

SEQ ID NO: 563 - DNA, 401 bp, Homo sapiens
atcctttcctgcactttactagccaaggcataagtatccatctgtatgagaagcagacaacagtaccagctcaaagctaaaacactgtggcttttgctaagcagggggaaagaaagagctttgttaggctttctgaaatcctgtaaagggctcatagaacactcctgccctcctgccattaacacccagaaaatcccaggygtgagcccactgctggagtgaagccatggaggaagctggctagctcagggccagaggcttggctgggataagaaacaatacacatgaaatcatctgtgactagagcatttgaatgggaacaaaggagtccctcgtagctcatgtcgatgttaattgctgaacattacagatagaaaaggaccgtctacctcaagaaaggc

SEQ ID NO: 564 - DNA, 401 bp, Homo sapiens
aaggcctggcaggaaggggtcatgagtactaatggcattctcgttgctagaactcagaagactccttcagacttgaatatccaccaagtatttgagcaccttctatccaaatatcttgtacatattctaaaaatacctaaaagtattcattttggaagaaaaatttcatcttctcctctacattatttttgtaaagaaacygtacaaagcagtgttacaaatagctgaaatttaaactgtacgccttattttatctgtcctacattggagaatatacttcttttttgcctcaagcatttttatatcggttaatttcccaaatgaattgactgaagatgtaattactggaaaggtggcagatgctactgagaaatctaattaattcagaatggaagtgacga

SEQ ID NO: 565 - DNA, 401 bp, Homo sapiens
ctatgctaggtaccgctttatacacacaatatcctcaaccaattctgtgagaaatcaatacctgcagtgcacaggtcaggaaactgggatgcagagaggttacaccacctgcccaaagccacacagtgctgggagagtcaagggaaaagaggccacatacatgtactcactttcaactgtttggttcctttggctgttttkagtcctatgatcacatggctaatggttttgccatatcctcccatgggattctctgtctcacacggagttagctctgtgacttcaccttcataaacttccttggtctcctttattcgcagccctggaagaggtggcagaggggccatggtgagaagcagaatcttttctctcacactgagagcccaaaacttccatgtcac

SEQ ID NO: 566 - DNA, 401 bp, Homo sapiens
cacactgagagcccaaaacttccatgtcaccagaactgccaaatcaaccttaataatgtacattccagggtgtcatgatgggtaaaaaggcaatacaaacatatcaatgtaaattagaggcactattagaaatgcaactttttttttttttttttttgagatagagtctcgctctgttgcccaggctggagtgcagtggcrcgatctcgactcactgcaacctctgcctccccggttcactccattctcctgcctcagcctccagcctcccgagtagctgggactacaggcgcccgccaccacgcccggctaatttttttgtatttttggtagggacagggtttcaccatgttagccaggatggtcttgatctcctgacctcatgatctaccctcctcggc

SEQ ID NO: 567 - DNA, 401 bp, Homo sapiens
tttctgactctcaaaggaaatcttaaaaccagtggaataactcattacacaccctctgacactatgaaacctgagcagaacatactaaaataattaggtatctatgtcaacagtgggtgacactcaaaactgccaggtgttatgggcctctggctctcactgcatactccaagaagaaatacccagttgtcatgcattatktgcaatgtgttgctctacaattttctttctttctttctttccctttttcttttttttttttttttttttttgagatagaatctcattctgtcacccaggctggaatgcaatggtgcgaacttggctcacagcaagctccgcctcccaggttcaagtgattctcctgcctcagcctcccaagtagctgggattacaggcgt

SEQ ID NO: 568 - DNA, 401 bp, Homo sapiens
acactcaaaactgccaggtgttatgggcctctggctctcactgcatactccaagaagaaatacccagttgtcatgcattatttgcaatgtgttgctctacaattttctttctttctttctttccctttttcttttttttttttttttttttttgagatagaatctcattctgtcacccaggctggaatgcaatggtgcgawcttggctcacagcaagctccgcctcccaggttcaagtgattctcctgcctcagcctcccaagtagctgggattacaggcgtgcaccaccacatctggctaatttttggggtttttttgtacttttagtagagataggtttcaccatgttggccagactggtcttgaactcctgacctcaggtgatccacccaccttggcc

SEQ ID NO: 569 - DNA, 401 bp, Homo sapiens
aatttttggggtttttttgtacttttagtagagataggtttcaccatgttggccagactggtcttgaactcctgacctcaggtgatccacccaccttggcctcccaaagtgctgggattacaggtgtgagctaccattcccagctgctctacagtttttctaaggccataacaacaaaaccaatttccaaagcaccttacrttagaatattgcaaataaaggtaaatttctctctgaattctaaacatcatccacattagctctttaataaacgtttgttcattatccaagaatcattgttaaattaacttttagaacgtgatctctatgttcattacatgcttttgcatataacggttctgcttcctgaaccactctttttagcttaggcaactcctcct

SEQ ID NO: 570 - DNA, 401 bp, Homo sapiens
tctctctgaattctaaacatcatccacattagctctttaataaacgtttgttcattatccaagaatcattgttaaattaacttttagaacgtgatctctatgttcattacatgcttttgcatataacggttctgcttcctgaaccactctttttagcttaggcaactcctcctagcagactcagtttaaaacgtatccccycccccttcacacattcttcttcctcatcctccaaattgtccccatggtgacctgtgtttccactggcacagcagcagcccacggcaatgccataacttgcagaccttgcctacccctctgcagattgcccacacctgagctgagggcacagcacataggcaggtagagtgaatggatgaatgaatgaagtcactaagagt

SEQ ID NO: 571 - DNA, 401 bp, Homo sapiens
cttatcattgggctgtttgccttctctaccccagaaacccagtcaggacaaagactctcagatattaaagttaaggaaaagttttactctaccttcattctatctgatagcctataaatggaagttttggaatagccccaaaagagaggacccatttcatttgtgctttaccaaattcttagttcctgaacattaatcttrgacaaaaattctccaaacaacacgaatatatcagaacactgtggtaaactgggaaaatcctgtacttttaaagtgaactttgattttttaaaatcaaaccttttatatcccacagcgataaattccttcaaatggaatgcttacttatatttactgctagatgaatgtggcatgaaattcctcaaggaggggaagaaaga

SEQ ID NO: 572 - DNA, 401 bp, Homo sapiens
actctgtagcccaagctggaatgcagtggcgcaatgtcacctcactacaaccaccaactcctgggctcaagcgattctcatgtctcagcctcccgattttgtttttgagacagggtctcactgttgcctgtgttgaagtgcagtggtgtgatttcagctcactgcagcctcgacttactcaggtgatcctcccaccccagscttccgagtagctgggactacaggcacacgtcaccacacccagctaatttttgtattttttgtagagacacagtttcaccatgttccccaggctggtctcgaactcctgggctcaaacaatctgcctgcctttgcctcctaaagtgctgagattacaggcaccaccatgagccatcaggcctggcctctctgtaaatttt

SEQ ID NO: 573 - DNA, 401 bp, Homo sapiens
cctgcctcagcctcccaagtagctgggattacaggcgtatgccaccatgccccgctaattttttgtatttttagtagagacggggtttcaccatgttggccagcctggtctcgaactcctgacctcaggtgatccaccggcctcggcctcccaaagtgctgggattacaggcatgagccaccgcactcggcctacatacartttttaaaaaattagctgggtgtggtgatgcacacctgcagtcctagctacttgggaggctggggcaggaggatctcttgagcccaaggagttgagcctgcagcgagctattgttacaccactgcactttagcctggacaacagagtaagaccctgtctctaaaaaaaatttaaaaagagaaaaatgttttaaaaataga

SEQ ID NO: 574 - DNA, 401 bp, Homo sapiens
agaataaatctaaatgttcaaaaaacagaaatggcttaataactggacttttatgtaacagttaaaagaaataagctatttctataagcagatctgagggaaactaggacttgcccagtgctgtgccagcagaaatggggccaaaaaactgccccagaagtcctagctagcaaaaagcaaaaattcgaaagagaagccatkttcttctcacagccaatcttcacagcaacggctctagaaatgagaaagatgtcggatcaaactacttctgccacttactaactgggtccctagcaagttatttaaccttctgagactgcttcttcaaatgcgaaatgtagattgataatctcccctcagaggagggaaggcctggctcatcacaggcactcactatgata

SEQ ID NO: 575 - DNA, 401 bp, Homo sapiens
tctgaaacaggagcacgagtaaggccagctccccaggtatatgggctaagactgaaaacaagcttgttactgaagaacaaagtgaaactgagacggtgtcttaaaattaacagtcaaggttcctctcagattttcttttctatgcccttttggtgatagttttgaggtagtaaaatctggtagagaatcagtgtatagcasagtataaaatgcactagccaggaacagaaagattagtgctggttctgccactaattttcagtgtgaccttgggcactcagcaaatctcaggtgcccgatttcctcatctgtcaaatgaaagtactaaagtgccatgctagatcacaagtggcaaactcgttgctcacagcctggttctgtttggcctgcagtctcatggt

SEQ ID NO: 576 - DNA, 401 bp, Homo sapiens
ctctcagattttcttttctatgcccttttggtgatagttttgaggtagtaaaatctggtagagaatcagtgtatagcacagtataaaatgcactagccaggaacagaaagattagtgctggttctgccactaattttcagtgtgaccttgggcactcagcaaatctcaggtgcccgatttcctcatctgtcaaatgaaagyactaaagtgccatgctagatcacaagtggcaaactcgttgctcacagcctggttctgtttggcctgcagtctcatggtgaccttcagcaaggccgagcacctggggctcaaggcagacacgccacagtgcacccagccacttccctcatccccgttgcctgcctcattaggcatctgcacttgtgagctcaaggctgaca

SEQ ID NO: 577 - DNA, 401 bp, Homo sapiens
gaaagacatatgcttctagcaatatggcacactgggtccactgaaaacctctcctcttacaaaacacctagaattgaataaataataacattcagagcagtaaactatttgccttgaaagttcagagactgtagatacaggaaagctcagcaaggtatagcacttaagatagaaacccctgaataaaaccgggactgggcrcggtggctcaagcctgcaatcccagcactttgggaggccgaggcaggtggattgcttgagcccaggagttcaagaccagcctgggcaaaatggcgataccccatctctacgaaaactacaaaaattagccaaagcgtggtggtgtgcacctgtagtcccagctactcaggaggctgaggtgggaggaccacctgaaccca

SEQ ID NO: 578 - DNA, 401 bp, Homo sapiens
agcaagtcaatactagagctggaatttaaagcccatttcttttcacacacaaccccaagctcctacttgcccacatcaagcggcccttttgaagaataagcaagctcaaattgggaactctggtgagtttcaagtatctggccagtcccctcacgaatcccaagaagccacacggtgtcctctgcctgaaaggcccttatyttccctgcaaagccaaatcctctcccagctctgaagggaaaatgtcaagtctcaacccttccagctgtaccagcccacagtgctgcctccttaaattccagctgcatttaatattagtcaatacctcaaagctgagcactcatactgagtcctcctgtgctgtcatgatttcctttctttctgccctggagagactgtaa

SEQ ID NO: 579 - DNA, 401 bp, Homo sapiens
aaaaaaaaaaaaatgatgtaagcaatgtgtgtgggtatgctatatccatcccatttccacttcagttaccaaagcacactgcccttaatagaacctagaagatattcttcagatgctacttttcttttctctttcagatggagtctcgctgtcacccgggctggagcgcaatggcgcgatctcagctcactgcaacctccrcctcccaggttcaagtgattctcctgcctcagcctcacgaataactgagactacaggcgcataccaccacacccggctaatttttgtatttttagtagagacagggtttcgtcatgttggccaggctggtctcaaactcctgacctcaggtgatccacttgccttggcctcccaaagtgctgggattacaggtgtgagcc

SEQ ID NO: 580 - DNA, 401 bp, Homo sapiens
atatttctaaatagataaaaaacctagccaggcgcgttggctcatgcctgtaatcccagcacttcgggaggccgaggcaggtgatcacctgaggtcaggagttcaagaccagcctggtcaacatggtgaaaccctgtctctactaaatatacaaaaattagccgagcgtggtggtaggcgcctgtaatcccagctactcasgaggctgaggcaggagaatcgcttgaacccaggaggcagaggttgcagtgagccgagatcgcgccattgcactccagcctgggcaacaagagcaaaacttcgtctcaaaaaaaaaaaaaaaaaaaaaaaactactatggtctttccacacaaccctgtcatatcataatccccagcactgaagctctttgggaaacccaa

SEQ ID NO: 581 - DNA, 401 bp, Homo sapiens
tcgggaggccgaggcaggtgatcacctgaggtcaggagttcaagaccagcctggtcaacatggtgaaaccctgtctctactaaatatacaaaaattagccgagcgtggtggtaggcgcctgtaatcccagctactcacgaggctgaggcaggagaatcgcttgaacccaggaggcagaggttgcagtgagccgagatcgcrccattgcactccagcctgggcaacaagagcaaaacttcgtctcaaaaaaaaaaaaaaaaaaaaaaaactactatggtctttccacacaaccctgtcatatcataatccccagcactgaagctctttgggaaacccaaggtagaagagactttacaaaccttggagatgtgcgtttatttacagaccaggacctcttccat

SEQ ID NO: 582 - DNA, 401 bp, Homo sapiens
aacatggtgaaaccctgtctctactaaatatacaaaaattagccgagcgtggtggtaggcgcctgtaatcccagctactcacgaggctgaggcaggagaatcgcttgaacccaggaggcagaggttgcagtgagccgagatcgcgccattgcactccagcctgggcaacaagagcaaaacttcgtctcaaaaaaaaaaaamaaaaaaaaaaactactatggtctttccacacaaccctgtcatatcataatccccagcactgaagctctttgggaaacccaaggtagaagagactttacaaaccttggagatgtgcgtttatttacagaccaggacctcttccatccattctccctcaatttccactccaactactctcaggtgagataagcttgaattct

SEQ ID NO: 583 - DNA, 401 bp, Homo sapiens
gaacctggtagctgaggtgggtcttaggcatacagcatcactcttaggcatagagcatgcacttaggcatagagcatgcactctgggtttaaatacatagacttgagttaaaatactggctctcgcacttaccagatgagtaaccttggacctacttatttgacctctatgaaccagaatttcctcacttgaacagagttyatactagtcaatggcacacaggttaaagggtgtaggggtaaagtgtagtgatgcctgcaattcaccttgaaatgtaaaagtggattgggagagggacagatgaaaagatatatgataaagcagcacagtaaaatgttaattatagaatttaggcacacaagtatttacaagtctttcaactttttttgtgtctgaaaact

SEQ ID NO: 584 - DNA, 401 bp, Homo sapiens
cactcttaggcatagagcatgcacttaggcatagagcatgcactctgggtttaaatacatagacttgagttaaaatactggctctcgcacttaccagatgagtaaccttggacctacttatttgacctctatgaaccagaatttcctcacttgaacagagttcatactagtcaatggcacacaggttaaagggtgtagggrtaaagtgtagtgatgcctgcaattcaccttgaaatgtaaaagtggattgggagagggacagatgaaaagatatatgataaagcagcacagtaaaatgttaattatagaatttaggcacacaagtatttacaagtctttcaactttttttgtgtctgaaaactgtcatactaaagcggggaagggacaactaatacgttgg

SEQ ID NO: 585 - DNA, 401 bp, Homo sapiens
ggctctccaaaggccaaggggcatggctgtgaccttagagaacagcaggcagagagggtggctgtatcatcatagagcactgatttgggagtcagaaatacacgtgggtgcaaaccccaggtttaccgttactaaaacgagtgtcaagcatatacgtgaagtgccctctccccaactcaatattttcacctgccaaaaaawaatatgtatgtgaaagtacttggcatcaccagcacttagaaaaaggagatttaattggaatggtcaaaaaggatgcttggaggggtggataaaccagattgctcttctccataattcccacttctctccctcagttcccggatcctgggaaccaaaatgagcttttaaagtttagtcaattccctactttaaaccgtccc

SEQ ID NO: 586 - DNA, 401 bp, Homo sapiens
tgggattacaggcattagccatagcacccagcagtaaatgttacattagttaaaagattagttcagctgcagtaacagagagatctaaaataacagtggatcaaacaagagagaagtcactttatctcacagaaagtccaagcaggcatgccaggaggtgggctggctttacaatcagtaagggcctatggtccttctatratgtggctctgccactccccacacacattgtctatcgtgtggtccaagatagctgctcaaactcctcccaaaagggctgaatttgcaccaactagaaggaaaaaaggggaagaagaggacatacttcttccctttaaccttgatattgaagttgcaccatcatttctactcatatcccaggggccagcacttaatcaaat

SEQ ID NO: 587 - DNA, 401 bp, Homo sapiens
tttatctcacagaaagtccaagcaggcatgccaggaggtgggctggctttacaatcagtaagggcctatggtccttctatgatgtggctctgccactccccacacacattgtctatcgtgtggtccaagatagctgctcaaactcctcccaaaagggctgaatttgcaccaactagaaggaaaaaaggggaagaagaggasatacttcttccctttaaccttgatattgaagttgcaccatcatttctactcatatcccaggggccagcacttaatcaaatagctagaactagctgcaaaggaggctgagaaatgtagtcttacactggatggatatgtgcccagttaaaaattcaattcctatgtaaagagaggagaagatagattgggaaacaactctc

SEQ ID NO: 588 - DNA, 401 bp, Homo sapiens
ccaggggccagcacttaatcaaatagctagaactagctgcaaaggaggctgagaaatgtagtcttacactggatggatatgtgcccagttaaaaattcaattcctatgtaaagagaggagaagatagattgggaaacaactctcaggcgctaccctaagcttctactatgtgccaagcactgctggattctccttgtatgygactcaaaggcaggtatgaccttccttctagccaaggcatctttactatctgggtctcaggttagcaacctgggccccattccatctctcaaaggccttgctccacccattaccttccttttcttgtatttccatctatcctccctgatcattcccacaggatatgtgcaatctttctccctcctccccctcctaatgtc

SEQ ID NO: 589 - DNA, 401 bp, Homo sapiens
aaatactttgaaatgaatgacaacaaaagaacaacgtaccgaaacttatgggatgcagcaaaagcagtgttaagagagaagtttatagctatgaacagctataataaaaaagaagaaagatctcaaattcataacctaactgtacacctacagggaccaggaaaaacaacaacaacaacaacaaaagaacaagctaaatcyaaaactagcaaaagaaaagaaacaataaagattagagaatagcagtattcccagtagtaaagaggcagaagcaatataagcatccattgacagataatggatttttaaaagatggtatatacatataatagaatattattaagccctaaaaaagaagaaaattctgacatgttacaatatagatgaatattgagccatca

SEQ ID NO: 590 - DNA, 401 bp, Homo sapiens
cactcaggcccaggagtttgaggctgtagtgagctttgatcacaccactgcactttagcttgggtgaaaaagtgagacaccagtccttcccaaactcttccaaaaaactaaagagaacactttctaatgcattctatgaggccagtgctgccctgataacaaagccagataaaaacattataaaacaggctgggcatggtrgttcatacctgtaatcccagcactttgggaggccaaggagggcagatcacctgagatcaggagttcaagaccccatctctactaaaaatacaaaaactatctgggtgtggtggcatgtgcctgtaatcccagttacttgggaggctgaggcagagaatcacttgaacctgggaggtggtggttgcagtgagccaagatca

SEQ ID NO: 591 - DNA, 401 bp, Homo sapiens
aaggggactttgtcttgcaacttggatactagcttagccacagtagaatggggcagcaggtagagtcctgaggcccttatttcaggctctagctcccagacgacatttctagacacaccctgggacaaaagagaatgcagcgtcttgaaggaggaaaacccagacttggcaggattcatcatctgctgagtagagtgcatrggccttgaataaacatcagtggtagccagacagtatttaccacgagccttgggtgagacccagtgccatgctggcttcaggtgaaccagcacattcccagttgtgatggccacagaaagaaaccctttctgtttgaagaaaggaaagaataaaagggactttgtcttgcaacttggacaccacctcagccacagtggggt

SEQ ID NO: 592 - DNA, 401 bp, Homo sapiens
ccagcctgggcaacaagagtgaaactgtcaaaaaaaaaaaaaaaaaagacaggctatttgaaaatacacagaggtggccaggcatggtggctcatgcctgtaatcccagcactttgggaggccaagggtggcagaccaagtgaagccagaagttcgagaccagcctgggcaacatggtgaaaccccatctctacaaaaaawaaaaataaaaataacaataaatgagctgggtgtggtggcacatgtctgtagtcccagctacttgggaggctgaagtgagagaatcaattgagcctgggaggtcaaggcagcagtgagctgtgattgcaccaccgcactccagcctgggtgagaaactttgtctaaaaaaaaaaagaagaggaagatgaaaaggaaaataa

SEQ ID NO: 593 - DNA, 401 bp, Homo sapiens
ttatttttgataagttcatcttttattctttcttcttaagatacgaatagtttacacaccacaattacagtgctacactactctgtggttgtctgtgtacgtactattaccaatgagttttgcaccttcaggtgatttcttattgctcattaacatccttttctttcagactgaagaattcactttagcatttcttgtagracaagtctggtgttgattaaatccctcagcccttgtttgtctaagaaagtctttatttctcttttatgtttgaagtatatttttgctgggtatgctatcctagtataaaatattttttcttcagcagtttatttatttatttacttattttgagatggagtcttgctctgtagcccaggctggagtgcaatggcacaatc

SEQ ID NO: 594 - DNA, 401 bp, Homo sapiens
tagacaaacaagggctgagggatttaatcaacaccagacttgtcctacaagaaatgctaaagtgaattcttcagtctgaaagaaaaggatgttaatgagcaataagaaatcacctgaaggtgcaaaactcattggtaatagtacgtacacagacaaccacagagtagtgtagcactgtaattgtggtgtgtaaactattcrtatcttaagaagaaagaataaaagatgaacttatcaaaaataataactacaataacttttcaagacatgacagtataataagatatatatcatagaaacaacaaaaagttaaaaagcagggggatgaagttaaactgtagaatttttaattagttttctctttgttcttttttttggcaattagtgttaagttgtcatta

SEQ ID NO: 595 - DNA, 401 bp, Homo sapiens
gacaaaaactatataaggagacaaagaagatcattatataatgataaagggaccaattcagcaagaggatataacaattgtaaatatatatgcatccaacattcgatcaccacatatagaaagcaaatagtattagacctaaagatcatgaacaaagaaacatgggacttaatctgctatagaccaaatggacttaatagrtatttacagaacatttcttccaacggctgcagaatacacattattctcctcagcacatggatcattcttaaggatagaccacgttaggccacaaaacaataagtgcctacatgaaaaaaaattgaaacactttaaataaataacttactggtgcatcttaaataactagaaaagcaagaacaaaccaaatctaaaattag

SEQ ID NO: 596 - DNA, 401 bp, Homo sapiens
aaaaactatataaggagacaaagaagatcattatataatgataaagggaccaattcagcaagaggatataacaattgtaaatatatatgcatccaacattcgatcaccacatatagaaagcaaatagtattagacctaaagatcatgaacaaagaaacatgggacttaatctgctatagaccaaatggacttaatagatayttacagaacatttcttccaacggctgcagaatacacattattctcctcagcacatggatcattcttaaggatagaccacgttaggccacaaaacaataagtgcctacatgaaaaaaaattgaaacactttaaataaataacttactggtgcatcttaaataactagaaaagcaagaacaaaccaaatctaaaattagtaa

SEQ ID NO: 597 - DNA, 401 bp, Homo sapiens
acaaagaaacatgggacttaatctgctatagaccaaatggacttaatagatatttacagaacatttcttccaacggctgcagaatacacattattctcctcagcacatggatcattcttaaggatagaccacgttaggccacaaaacaataagtgcctacatgaaaaaaaattgaaacactttaaataaataacttactgrtgcatcttaaataactagaaaagcaagaacaaaccaaatctaaaattagtaaaagaaaagaagatcagagcagaattaaataaaattgaaataaaaatacaaaaaagcaatgaaatgaagagttggttatttgaaaagataatatcaacaaatctttagtcagactaagaaaaaaacagagaagacccaaatgaatgaaa

SEQ ID NO: 598 - DNA, 401 bp, Homo sapiens
ctgcagaatacacattattctcctcagcacatggatcattcttaaggatagaccacgttaggccacaaaacaataagtgcctacatgaaaaaaaattgaaacactttaaataaataacttactggtgcatcttaaataactagaaaagcaagaacaaaccaaatctaaaattagtaaaagaaaagaagatcagagcagaawtaaataaaattgaaataaaaatacaaaaaagcaatgaaatgaagagttggttatttgaaaagataatatcaacaaatctttagtcagactaagaaaaaaacagagaagacccaaatgaatgaaatcacagatgaaaagggagacattacaactgatgccacagaaattcaaaggatcgtgagcaactactatgaacaact

SEQ ID NO: 599 - DNA, 401 bp, Homo sapiens
gacattacaactgatgccacagaaattcaaaggatcgtgagcaactactatgaacaactatatgtcaataaattggaaaacctagaagaatagataagttcttgacatatacaacctgccaagattgaaccatgaaggaatccaaaacctgaatagaccaataacaagtaacaagatcaaagctgtaataaaaagtctccyagcaaagaaagacctgagacccaatggctttagtgctgaattttaccaaacatttaaagaagaactaatatcaatcctcctcaaactatcccaaaaaatagaggagggaatacttccaaacttattttatgaggtcagtgttaccctgatacccaaatcaggcaaagacgtatcaaaagaagaaaagacaactacaggcc

SEQ ID NO: 600 - DNA, 401 bp, Homo sapiens
cagaaacaaatccatacatttacaatgaactcattagacaaaggtgccaagaacatacactggtgaaaggatagcctcttcaataaatggtggatagccatacgagagaaaatgaaactagacccctatctctctccatatacaaaaatcaaatcaaaatggattaaagacttaaatctatgacctcaaactatgaaaccmctaaaataaaacattggagaaactctccaggacatccttctgggcaaagatttcttgagtaataccccataaacacagacaaccaaaacacaaatgggcaaatgagattatataaagttaaaaagtctctgcacaacaaagaaacaatcaacaaagtgaagagacaacccacagaatgggggaaaatatttgcaaactat

SEQ ID NO: 601 - DNA, 401 bp, Homo sapiens
gggttgtttgtaacacaaataaattatgtacgcttgaaatggtgaataccttatttaccctgatgtgattatacattgtatgcctgtgtcaaaatatctcatgtactccttaaatgtatgtacctactatgtacccatataattaaaaaatttttaaaaacttcctcaatatgatatgatacaagtttttttgtttgtttkttttttttttttttgagacggagtctccctctgttacccaggctagagggcagtggcgtgatctgggctcatccttgtgtgctaatagacctgagaacaaagcttactcaggggtggggctgctggcttttagattataggcacactccctgcacctgctcccacgttttcagcagcatttggacttatccacctttcta

SEQ ID NO: 602 - DNA, 401 bp, Homo sapiens
tatttttgtggtttctgactatttctggtaagttataatggttttctatgtatggagaaatacttcattaagtaaaaaaagcaggtcaattgaaagaaaaatggtaattaagtcataggtgttccctagatagcacagaaattctgaagatggctcttcatatcaccaaggctggggaaatctgacataaaccaaggttcrtctgggaacagaggggtctgtcctgatgctccaggtggcctggtaagccttacctcacaaaatgtcccaggttcaaatcctgctttttctgagcaagttacctctcattcccctctgctgtaaaacagtgatgacaacactcacaggattattaagataattaaatgagatcttaatgagggactctagcactgggaggg

SEQ ID NO: 603 - DNA, 401 bp, Homo sapiens
gggcataacacatggtgtcaacaccttggagtatgaagacatggactttttttcttttcttttcttttcttttcttttgagacagagtctcgctctgtcacccaggccggagtgtaagtggcacaatctcggctcacggcaacctctgcctccccagatcaagcgattctcctgcctcagactcctgagtagctgggattrcagatgcccactacaacacccagctaatttttcatttttagtagagacggggtttcaccatattggtcaggctggtctcgaactcctgacctcaggtgatccacccgcctcggcctcccaaagtgctgggattataggcacgagccaccgtgctcagctttcttttcttaatagttgccttctctctgtgtgtcctggcc

SEQ ID NO: 604 - DNA, 401 bp, Homo sapiens
tgtcaacaccttggagtatgaagacatggactttttttcttttcttttcttttcttttcttttgagacagagtctcgctctgtcacccaggccggagtgtaagtggcacaatctcggctcacggcaacctctgcctccccagatcaagcgattctcctgcctcagactcctgagtagctgggattacagatgcccactacracacccagctaatttttcatttttagtagagacggggtttcaccatattggtcaggctggtctcgaactcctgacctcaggtgatccacccgcctcggcctcccaaagtgctgggattataggcacgagccaccgtgctcagctttcttttcttaatagttgccttctctctgtgtgtcctggccttagcagtagatttt

SEQ ID NO: 605 - DNA, 401 bp, Homo sapiens
actcacaggaactgctttggagcctagagacgggaaattgggctggggacagaggtcaggttagcaagggcaaagcccatgcctcccaccataaagtcctctgctgggagcagtgtttccgtttcagcaggcacgtcccaacgcaatgggtaaacctggccacatccgctgactcccagagtctgcctgggaacgtggccragcctggagctcccatgggtcctgtctggagcacatggtagtggggtcagaggtcaatcagggtaggttggatgaatgcagctggtctgacaagagggcaggcattgaggtctcttctggtgaagatcttaactgtcaaattgtggtcctgggtctaggatgtggaataagcctggtaaagaccttgcagagctctgatg

SEQ ID NO: 606 - DNA, 401 bp, Homo sapiens
tctctcctttttttgtttttgagatggagtctcactctgtcgcccaggctggaatgtagaggggtgatcttggttcactgcaacttctgcctgccaggtttaagcaattctgtcacctcagcctccagagtagctggcattacaggcgcacgccaccacactcagctaatttttgtatttttattagagacggggttttamcatgttggccaggctggtctcgaactcctgacctcagatgatccacccacctcagcctcccaaagttctggggtgacaggcctgagccacagtgcccagaccctcctgccactctcttataaggtcccttcatgattacaccaggcccaccctgatactccaggataatctcctcatctcaagacccttatctatttttt

SEQ ID NO: 607 - DNA, 401 bp, Homo sapiens
gcatctgtgtgtgtgtgtctctgtgcgtgtgcacgggcatgtgcatgtgcgtctgtgtatctctatgtgtgtgtatggccccatttgcctgccgctgtgtgcacgtctgtgtgtgcgtgcatgtatgcgtgtgtgtctcatgcgtgtgcacatgtttgcgtgtgcatctgtgtgcatgcacatgtgtctctgtgcgtgtgsatggccccatctgcctgccgctgtgtgcacgtgtgtgtacgtacatctgtgtgtctctgtgcgtgtgcacgtgtgtccatgtgtctgtgtgtgtgtgcatgcatctgtgtgtgtgcgcacttgtgtgcgtttgtgtctctgtgagtgtgcatggccccatttgcctgccactgtgctgctgtaaggactgtggctcctcg

SEQ ID NO: 608 - DNA, 401 bp, Homo sapiens
ggtgtatgaaagaaagagaggagtcaagaactgagccagtttgctgcttaaaaaactgggaggatgcagttctcattcactgtgatgggagtggagtggagggtaaaaccagaaattctgaccttgacatgtaagtttgagatgcctattacacattcaggttgtgtatgtgagcctgcagttaggagggggaggctcctrgctgcaggctcacacacagaacctgaatttgggagtcaatggcttgtaacgccaagagacatagacatcaccagggagtaaacatatagagagaaagttggagggctgagccctgggaccttcttgtgtctgctgttatccatctcttatgtatccttgtagggctattctgtacttgtacaagcacatatatatagaga

SEQ ID NO: 609 - DNA, 401 bp, Homo sapiens
ctcctggctgcaggctcacacacagaacctgaatttgggagtcaatggcttgtaacgccaagagacatagacatcaccagggagtaaacatatagagagaaagttggagggctgagccctgggaccttcttgtgtctgctgttatccatctcttatgtatccttgtagggctattctgtacttgtacaagcacatatatakagagagtgcatttttcataaatgcaaacatgctacacacactagtgtgcaccctattttttcagttaccaatattatcttagagattgttcccaagtagtgtacaaacagcttctttgttcttttcaaagtctgcatcgtattccacagtatagacagaccatgatctctctttttctatttacagtttttcattatgga

SEQ ID NO: 610 - DNA, 401 bp, Homo sapiens
tggagtgcagtggtgcgatcatggctcactgcaacctctgcatcccgggttcaagcaattctcgtgcctcagcctcccgagcagttgggattacaggcatgcaccaccatgcctggctaatttttgtacttttagtagagacggggttttgccatgttggccaggctggtcctgaacttctggcctgaagtgatctgcccrccttcgcctctcaaagtgctggggttacaggtgtaagccactatgcctggcctttgtcttgatataatttcaaacttaccataattattctttttaaggacatttactttgtttataatattttgctactacatacaatatagaaaagaaatacttggtactagaacatgccttttcatgaagactactttccttggggc

SEQ ID NO: 611 - DNA, 401 bp, Homo sapiens
gggttcaagcaattctcgtgcctcagcctcccgagcagttgggattacaggcatgcaccaccatgcctggctaatttttgtacttttagtagagacggggttttgccatgttggccaggctggtcctgaacttctggcctgaagtgatctgcccgccttcgcctctcaaagtgctggggttacaggtgtaagccactatgyctggcctttgtcttgatataatttcaaacttaccataattattctttttaaggacatttactttgtttataatattttgctactacatacaatatagaaaagaaatacttggtactagaacatgccttttcatgaagactactttccttggggcccaaaagaacaagaggctggggcctgaaacgcttccagagcaactg

SEQ ID NO: 612 - DNA, 401 bp, Homo sapiens
taagcatcctcctcccttgcaccagtaactctcagccatgctgccttatttctcccaaagcacttcatcattatttgccttattcatccacagttgtatccctccaaaatatcatgtctgccacacagcaggtgttcaatcaatatttgttagaatatttgttagaagatttgtattagtcaggattctctagagggacaraactaatggaatatacatggaatatatatatatctcctaagcccaggctacagactctcagggtgagaatttctgagtcagagataatgttgtcctcttccatcttggaatatgtatacatatatgtatatatattccatatatgtgtatatatattccattatatatatatatatgtatgttccattgtatggaatata

SEQ ID NO: 613 - DNA, 401 bp, Homo sapiens
atatattctatatattatatattctatatattatatattctatatattatatattctatatatattctatatattatatattatatatatatattctatatatatattctatatatataatataatattctatattatatatataatatattctatatattatatatattatatattctatatattatatattatatattmtatatatattatatatattatattatatattatatatataatatatattctatattctatatattctatatatattatatgttctctatatattctctatatatctatatattctatatatattctgtatatattctatatatattctatatatattctatatattctatatatattctatatatactctatatacattc

SEQ ID NO: 614 - DNA, 401 bp, Homo sapiens
tatatataatatatattctatattctatatattctatatatattatatgttctctatatattctctatatatctatatattctatatatattctgtatatattctatatatattctatatatattctatatattctatatatattctatatatactctatatacattctatatatactctatatattctatatatacactrtatatattctatatatatatactctatatatctatatataaaatctatatatattctatatatagatatataaactatatcaagtgatctgcctgcctcagcctcccaaagtgctgggattacaggcatgaaccaccgtgcccagccaaaccttttttcttttcattaccatttcaggattctgtttaaaacagaggtaa

SEQ ID NO: 615 - DNA, 401 bp, Homo sapiens
ctatatatatatactctatatatctatatataaaatctatatatattctatatatagatatataaactatatcaagtgatctgcctgcctcagcctcccaaagtgctgggattacaggcatgaaccaccgtgcccagccaaaccttttttcttttcattaccatttcaggattctgtttaaaacagaggtaagaaatgagktttatttgaagccaggccctgtacaaagtctttgttagttgaaatatttctcagaggtacataaagcctctaaagctcttattacctatttactaaccctcccttttaaatacgtttactgcttttactactagattttttttaatgggaggcgtatttttacagtttcctatttgcaaggtgggaaaacggaaacaaag

SEQ ID NO: 616 - DNA, 401 bp, Homo sapiens
gatcctgtgaactttgtgctccaccgccacagtgttacaaaaacactctcttctccagaaaaatggaaggaggaggcaatgttgggctagcattcctgcctggtatcactggctgagactgagcagtggcttccctctttgcacaggaaaagggctctccaggtctcccaggtccccaccactccctgtcatcttagactsttttaacttctcttctttgatttacccaccacctggccagagcagacacttaggtttgttacctctggttggtgactatggctgacaaccttttttgtggttctagacacttcagaatctagtgagagttgtcgaccctctgtctagcaagagcacatcacaacacattgtgcgttcaatttagaggtttgtggcctctc

SEQ ID NO: 617 - DNA, 401 bp, Homo sapiens
aggtgaggggcgggccgggcgggtgtccgaggcggcggcggcggcatggcagggcggcgggtgaacgtgaacgtgggcgtgctgggccacatcgacagcggcaagacggcgctggcgcgggcgctaagcaccacagcctccaccgccgcctttgacaagcagccgcagagccgcgagcgcggcatcacgctcgatctgggyttctcgtgcttctcggtgccgctgcccgcgcgcctgcggtcgtctttgcccgagttccaggcagcgcccgaggccgagcccgagcccggcgagccactgcttcaggtcacgctggtcgactgccccgggcacgcctccctcatccggaccatcatcggcggtgagcgcgggccggggcgggagccgggctcagggacgcg

SEQ ID NO: 618 - DNA, 401 bp, Homo sapiens
cgagccactgcttcaggtcacgctggtcgactgccccgggcacgcctccctcatccggaccatcatcggcggtgagcgcgggccggggcgggagccgggctcagggacgcgggcggagcgaccgggccccgtgtccgaattcgctcgagcctttgccgggacgggaaatcgccccacctcattggtggggctcctgacgcyccaagaggcggacgtgacttgcctagggctccgcagcaagtgagcggaggctttgagattcagcttttcccatccagcagaaccgagctgcaaggcgccttccttaaaaaaaaaaaaaaaaaaaaatcaaaaaatccctaccaaatgtgtttataatacatggtcaagtaaagaaaactcaaaataagaaaactcacaag

SEQ ID NO: 619 - DNA, 401 bp, Homo sapiens
agatttgagaggactgactccagttttgaaagcaattctgtgagtaaaatgccatcaaacagcttcacatgctacagataaatttttgtaaaaggaagagtcacctgatgtggcaaacttcattgtcttatttcattagattgccacagtcaccccaaccttcatcaaccaccaccctgatcagtcggcaaccatcaccaytgaggcaagaccctccaccagcaaaaagattatgacttgctgaaggttcagtaatcattagcattttttagcaatgaattattttaaaattaaggaatgtttattgttttttgagacatactactattgcacacttaattgacgacatgtcatgtaaacataacttttatacacattgggaaaccaaaaaatttgacttg

SEQ ID NO: 620 - DNA, 401 bp, Homo sapiens
acacattgggaaaccaaaaaatttgacttgctttattgtgatattcactgtgctgcagtggtctggaactgaatgcacaatatctttgaggtaagcctcatttgtagagaagctcttcatattgcaaaaaagtttcagcacttgcctggtcctatataaccaattgtaatgccctgaagaatttggcaagttttttatttmgactaaaactgtagaagaacttatttttgtatgtacattgttgcttatcttttgtctcatctctggagtagggagatttatcttcttaaaatatggcctgagtggaatggaatgctgagaccaaggctgctaccattcttccttgaatacatcagagacccaccttccttttcagggaattgagaaaaaacaatgttttt

SEQ ID NO: 621 - DNA, 401 bp, Homo sapiens
tggaatgctgagaccaaggctgctaccattcttccttgaatacatcagagacccaccttccttttcagggaattgagaaaaaacaatgtttttcttgtaaagagaaggtgttccccattgagtgcctgctcgggcccaggcctgttgccaggaacttgcatctatgcaataccaccctgtgtggtgggagtgttagttagycttatttctcagatgaggaaacccaagcaaagtgccttgggctagtgttggaacctaactccgccacccctaacctggatctggttaataccttcatttcacctcatggtccacaaacttgtgggcatctttgccttcttgaaatggcccccaaggccatcctggcttatggcacctggacttctacagttctgccccct

SEQ ID NO: 622 - DNA, 401 bp, Homo sapiens
acccctaacctggatctggttaataccttcatttcacctcatggtccacaaacttgtgggcatctttgccttcttgaaatggcccccaaggccatcctggcttatggcacctggacttctacagttctgccccctgcctgcttattctcctcctccctctgattcattctctgcacagtgggcattgctctccttttacargtgttcatcagatcatgtcagccctacacttgacaagactttccagtgagttctcattgtgcttggagtaaaatccagccactttgtggcccataggacaatggtctggctctgctttcctctgatcccatcaacgatcccatcaacgactgctccccactctgaccttcagtcacggtggcctcatttctcttcctcca

SEQ ID NO: 623 - DNA, 401 bp, Homo sapiens
caaggccatcctggcttatggcacctggacttctacagttctgccccctgcctgcttattctcctcctccctctgattcattctctgcacagtgggcattgctctccttttacaagtgttcatcagatcatgtcagccctacacttgacaagactttccagtgagttctcattgtgcttggagtaaaatccagccactttrtggcccataggacaatggtctggctctgctttcctctgatcccatcaacgatcccatcaacgactgctccccactctgaccttcagtcacggtggcctcatttctcttcctccagtgggcccaccagctgcttccctcaggacatttgcacctgttgttgcctctgtttggtacatctggctccttaagtctctgcttta

SEQ ID NO: 624 - DNA, 401 bp, Homo sapiens
atggcacctcctcagcagcctctcctgccccacctatctaaagttgtctcttcaaccctcaccccctcatactttctcatgtccctgtttcattgccccagcagcccttttcactacctgacgttcttcatgtgtttacttgttgagtatctgtcctctgctagaatgtgagctccatgagaccagagcaggaaccttgtytgtctcattcaccagtgttctcagcacttgggccagagcctggcataggatagatatttagtaagttctggatgaatgaagcctgtgtaccagctcctgggctagccagttttagtgagcagagaaccttctttgtgggttagtggacagaaggcaactagcttagggcctggcctgtagtgaattatgcaggttggttc

SEQ ID NO: 625 - DNA, 401 bp, Homo sapiens
cagagcagtatttttcttgaatccattttagagtataaatctttcagggttacaacttcaaaaagattcagtaatgtatgttttaaagacttgggtgggtgtgagggacttagactcatcctcaatctaactctggcaggaaagaggagggctgaaaaatgctggtatcttggcttggcaatttatagtcctctggtggcygtgaggattaacagtgtattgtctcccagtcttttgtttcggttgttaatgaacagcactgctacttgtcgcctggacctcttgccttctgtacacactattttagcggtgcctcctgcgtgggtctgaccctctctgagccctccctgccaagagctgaggagggctgcaaaagacttctaagtctgactcaggttact

SEQ ID NO: 626 - DNA, 401 bp, Homo sapiens
ttctcttggcgctggacagcgggtgattttgctttagcttgggtgacagtgtgggagtagcgcaacatcagagacacagccttgagtttaaattaatgcagaatatttgagcaggaaccaacaggaaagaaaaatggaagcaggtagtcatatttcattctgttggggtacatttttcttctcatggggcttgcccttgakaacaaaacatatcaaaagttaaatcaaagaatatttttgtagtcgtgctaggaatagaaaataatgcaaagactctggcttcttgaggcaaatattttgctggaaggttataatcaaagtcagaaggaaatcatagccacagctttcggtaaagctgtaatcatttaaaattaattgcttttaaacttttcactgagcat

SEQ ID NO: 627 - DNA, 401 bp, Homo sapiens
acagtgtgggagtagcgcaacatcagagacacagccttgagtttaaattaatgcagaatatttgagcaggaaccaacaggaaagaaaaatggaagcaggtagtcatatttcattctgttggggtacatttttcttctcatggggcttgcccttgagaacaaaacatatcaaaagttaaatcaaagaatatttttgtagtcrtgctaggaatagaaaataatgcaaagactctggcttcttgaggcaaatattttgctggaaggttataatcaaagtcagaaggaaatcatagccacagctttcggtaaagctgtaatcatttaaaattaattgcttttaaacttttcactgagcatcccctttgttttctatcagcatgtctcttgggtttttcttcggaa

SEQ ID NO: 628 - DNA, 401 bp, Homo sapiens
cccataaattaagccctaagacatattcccctttctgtcattcttttgtttgatggagcctcaaccaggctggggatgagatactcttaccttaagagctcaattctgtgtcccctttaccagtaaaggctttgatgtgcggaaaatgatggtatctatagctctggtactctgggtatcttggaggcccagtcttggtgrgggtagagcctggcacttctgaggcagcctcatggtaggatagggagctggagtgagtcctcgttcttctaggctctggacttggttgcacagcatgcatccctcttggtgtgaacacttcactccaatggctggtttccatgtctcctctttccattagcctggaagcttgatggggtagagacaatatctgaatcatc

SEQ ID NO: 629 - DNA, 401 bp, Homo sapiens
tctggattgaccggtcctggacatttcatataagtagatcacacaatatgtggcctttttgtctggcgacttttgcttggcctcctatgttgcccaggctggtcttgaactcctgaagttaagcagtcctcttgcctcagcctcccaaagcgagcatatgctttgggaaccagtattgcatttttttgtgaaaaaaaaaamaaacaaaactatttctattgatttctacttgtggtaaagtataaataatgtacaatttgccatcttagccatcttaagtgtacagtgtgtggcatgtgctcctcaggctgcctcctctttctgtgatgtgcctggcccatggagacatttgggctggtaggccttgttttaagggctttcggcagcttgtgtggtgggaa

SEQ ID NO: 630 - DNA, 401 bp, Homo sapiens
atgcccagatagggactaatggatgtggggcatctactttagtttggaggccagggaaggcctttctgaagcaataaagctgaagctaaactgtggcacaaaagcccgtccctggaatgttgggaggtgttccagaccaaaggtgtagcacacatgagggtcctgaggctggacatctcctggggctagctacgagtgagrgggtatcagctggttttcacacagcagacctggtgttgcaggtatatttggacagatgcatatatctggactctctggaagtcccagttttgctgaaagataagcgtggcacatcctatcattctgaaataggacacggtgagacagaagaaggcaggccagccttctggatatgcctggtctcactatggctatcctat

SEQ ID NO: 631 - DNA, 401 bp, Homo sapiens
acatctcctggggctagctacgagtgagagggtatcagctggttttcacacagcagacctggtgttgcaggtatatttggacagatgcatatatctggactctctggaagtcccagttttgctgaaagataagcgtggcacatcctatcattctgaaataggacacggtgagacagaagaaggcaggccagccttctggakatgcctggtctcactatggctatcctattggcctttatccatccttagtcttatttctggtactgtaaccccttatttccatggtagagggatgggctgatgtggaatcagcgttggcaggcaatcctggcagaaagtgaattagacatttttcacaactctgtgattgtgtttggtcattaaacattggcccactggct

SEQ ID NO: 632 - DNA, 401 bp, Homo sapiens
ggctgaaggcaatgcatggcggtggggcaggcggcatattttgccttttctttttcctccagaaacaagtttggcatgggacttggtcagtcttgatctgtgcctggaagtgtgaaggcgtgggtgcagatgttgggataatttttgtacctcagaaccagaactggacactcactgtagggaagaccagctcctcacccyccgccccgcctcccccgcctggcccgaggttcctgttgagcaggcatggcctagcctcagacttgcatgcatatttttctgctgttgattttctcaaattctttcacaagggaacagtagtttacatcctttaaagctttcttgaggctgggcacggtggctcacgcctgtaatcccagcactttgggaggcggaggtgg

SEQ ID NO: 633 - DNA, 401 bp, Homo sapiens
agggaacagtagtttacatcctttaaagctttcttgaggctgggcacggtggctcacgcctgtaatcccagcactttgggaggcggaggtgggtggatcacctgaagcaggagttcgagaccagcctagccaacatgacgaaaccccgtctctactaaaactacaaaaattagccatgcgtgtgtaatcccagctacttgrgaggctgaggcatgagactgcactccagcctgggtggcagagtgagaccacgtctaaaaaaaaaaaaagctttcttgggataccagtttggtcttctggtgacagaaccttgcccataggttagaggaaataatactttcagcaacacccccagcttgggggatctcagaaagaagggcatgttgccaacttttgaggat

SEQ ID NO: 634 - DNA, 401 bp, Homo sapiens
ccaatactggggaagagttgaaaatggaggaaatactgctgagagaatggtgccccaagtgaagatagcagggaggggttgtgtgtggccttgtgtgtacagtggcagagtgcttcaggggcttggcctgccacgtggatggcctgctctcttccagccctatccgcattctcgcacagataagtgagaggaatggtgggsacccaactgcaaggcgatctcttagggttgggcactatgacaaggctagaaaagctatttctgccacctggaggaggaaacattgctctggccgctgctctcagaggccctcccctctgtttccacagatcctgctctctgactgccatggcctggtacgaatgccctttggtgaaaaaggccagtgaaacccagggctg

SEQ ID NO: 635 - DNA, 401 bp, Homo sapiens
actctaatgctaggaattatttcctcttttgtggtctttggtctttccttcaggtttcctgttgctttctaagggaggtgccaggtgctggccctgtggctagttttggctagtgaggaatgctgtaaagcagctgtgacaccagcgtgcagcagtcctactgctgtgcagcctgggcagtgggtggtgacagggtggcaytggagtgaacaaggtgtggggaagacgagcgtaggtggaaaaaatgtagaccgaccttctcggtaaaactggcctgggatcccaggcaacatgaaggctggcagatgctgagggagttctctaggggaggctgataaaattcgacatcaccttaccatttaatgagtcccagatacatgggctatgccagcccaacagag

SEQ ID NO: 636 - DNA, 401 bp, Homo sapiens
aaatctaaagctttctgaatgtttccctttcttccccaggccaacacataggcctggctcagaccctaaaaatattaagctattaaggctttttttatcttggttttaagataaggaatcaacaaaaaaaagctttccaaaacttaatcatataaattcacttataagcctccccacaacattgaatcaataatccagtayggcctgtaatcccagctacctaggaggctgaggcaggagaatcacttgaacctgggaagcggaggttgcagtgagctgagatcatgctaccgcactccagcctgggtgacagagcgagactctgtctcaaaaataataataataataataataataataatccagtatgttcatttaaactacagaaaaaaattacagca

SEQ ID NO: 637 - DNA, 401 bp, Homo sapiens
aacttgtattttgggggctgaggaaaagcactagaaaattcagctcctaaagatcattcttcatgagatgtcaatagcctccagacaaattatcatgtgaatattttctaaaccataaacaaattttgctaccattgtgtttagactcaaagttagtttaaaagagaaatttctaaatgaaacttcctaacggtcattctktcgggggcaggcagattggtagaagtaatatataaaacccaaggacaaaatggcactttgttttttttctattaaactcttttgctgtttgctgtttcaaaaattcatactgaatctttacaatgaaacatttgtgagtccaggagcccagaaccctaaatgaattcagattgacttctttttctgtacggtctatcaaa

SEQ ID NO: 638 - DNA, 401 bp, Homo sapiens
aatatttgagtatctgaggctagatctcattgcctctatatcagggaaatgaaccaaaaggggcaagttttaaaagtttgatttggggaaacagataccatttaggagagagatggtaggctgtgtttacctcgttgtccgaaggctgctcagactttagtcagctctccaacttgcagcttgtccctcagagatgcagtmgtggcttgggccggcagacgggcttgcgttagcatttcatttaaaagcgatcggtacttttaaattaaacatgcaaagttatcttggtgaggtattgaatgggaggttgctggattattgaatttggcccaaaatttagccagttcagcagggattttggggtctgaagcaattaatatgcaagtacatttgagtcagca

SEQ ID NO: 639 - DNA, 401 bp, Homo sapiens
cctctatatcagggaaatgaaccaaaaggggcaagttttaaaagtttgatttggggaaacagataccatttaggagagagatggtaggctgtgtttacctcgttgtccgaaggctgctcagactttagtcagctctccaacttgcagcttgtccctcagagatgcagtagtggcttgggccggcagacgggcttgcgttarcatttcatttaaaagcgatcggtacttttaaattaaacatgcaaagttatcttggtgaggtattgaatgggaggttgctggattattgaatttggcccaaaatttagccagttcagcagggattttggggtctgaagcaattaatatgcaagtacatttgagtcagcaaggtaggagattactgtcttatcagagtaaaa

SEQ ID NO: 640 - DNA, 401 bp, Homo sapiens
tcttggtgaggtattgaatgggaggttgctggattattgaatttggcccaaaatttagccagttcagcagggattttggggtctgaagcaattaatatgcaagtacatttgagtcagcaaggtaggagattactgtcttatcagagtaaaaaaaaaaattctttttccaagatccatacttttttggaggtagataaaaaytccattgtttgagattcatgtttgtgagtgaccacctcaaattgccaggttttaaccactaaaacacagaggagggaataattgcatttaaaatctctgatctgttatttgcattatgcttagcatagaggagaccccaatttccttcctcatgtttttggtttttttttgccattttgttaacatagattgagaggaaa

SEQ ID NO: 641 - DNA, 401 bp, Homo sapiens
ctttttccaagatccatacttttttggaggtagataaaaactccattgtttgagattcatgtttgtgagtgaccacctcaaattgccaggttttaaccactaaaacacagaggagggaataattgcatttaaaatctctgatctgttatttgcattatgcttagcatagaggagaccccaatttccttcctcatgtttttkgtttttttttgccattttgttaacatagattgagaggaaacttaattttctttcttgaaaaaatcattcactgaactgctcaaaacacatgaagttgtttttgtctcatcagatcgagtacttaagacaaaactacgaaggacttcaatatatggttaacctctcatgtgctctgtgaatctagacacactccatccgag

SEQ ID NO: 642 - DNA, 401 bp, Homo sapiens
ttgatttgaccatctgcctcatttcaggagtttggagacctcggaaatttgagagatcactcctgggtagcaagttgcccttttgccagggcctccttgtcccttagaagcatctagccttggctgcttcagggggcacttcaggacatggatggggactgaccatgtcctttggcaggtgacgcagggagtcagcctggrcgtgagtgggtgtgtggctggctccctggcaaagagctgccacagtttcctaaggggccccatcttttccatccagtgggacagcctttctatttcagatgaaggataaaatacttggtagaataactttcattgttcccattcccaaatccttttctgtgtgtggagagcattctgagtttgtctgtttgtttactgtc

SEQ ID NO: 643 - DNA, 401 bp, Homo sapiens
ccatcctgatccagatttagaaacacaacaaaaacaaaagagaagcggtgatataaaatggaagtagaacttggcgttggctagtggagacggcgataaggagttttgaagtgtctctcctttgaaaggtctttcttgttggatcactgctcccccagtatgtctgatccttatgcacagcccacctgggctggtgggggkcggtcctcatcacactgaggctgggtttctttaacttcagaaatgtcctgaggaataagaaatgaaacatgagcaatacagggttaatgttgtcaagccatgtttgtttttgtttttgtttttctttgtttctttttgtttgtttgttttttgatacgaagtctcgctctattgctcaggctggagtgcaatggcacgat

SEQ ID NO: 644 - DNA, 401 bp, Homo sapiens
tgcctattaaattatcttgtgtaatgcccccgcacatctgggagaagagttttgttttggttttagttttttaaataaatgaagaaaaggtgactcagacaggttaagtaactatccaaaaaaaaaaaaaaaattctgtagtaagaaggtggtcaatccaggattttaaaaaagtattacattttggattaggttatataygtacatgatagaaaacttaaataatgttaaaggatatgcagagaaaagtatgccttccttctgtctctgtgtttcagtctccttacactccccgcactgccaacacacatcatcagttttcatttgtgagcgtgttttggagatgggtccatattactttataatagtttcccctcattctttgtattgacaacatactg

SEQ ID NO: 645 - DNA, 401 bp, Homo sapiens
cctgtgcagtaggggttagggttgctgctcttgcctagaaggagccagagggctcccaccagccctgctgctagcagagacctggcgaccactgtggctttggcacttggcctgcttcccaccagccacagagatcggggcgggggggtggggtggttggtctagtagtgggggtgggcgggttgccagagagaaggagcrggaagaggcctttcttttcaatttaccctctttttgtatgccataatcttgtttttctttggaatcccgctgatccaggcctgaattctagttttaccattttactagctgaatgatctttgtcaacttatttaacctttctgaacttaaggcttaccatgagtattaaggcttaccatgagtaaaaatggtgctcagaa

SEQ ID NO: 646 - DNA, 401 bp, Homo sapiens
ctagctgaatgatctttgtcaacttatttaacctttctgaacttaaggcttaccatgagtattaaggcttaccatgagtaaaaatggtgctcagaatacctacctgttagagttgcttcgagaacatagaataaatattactgctagtactttattgagctttgactatgtcaggtacttcctaaaccctttaacctgtgktaatctgatttaatcctgataaacctctaatgagttagacactgttcctatcctcttatatgtgacttgaaatctaaaaatgttagtaaacatttgaccccaacctgttgggctcccaagcccatgatcttgaccactaggctatgctgcctcccataaatgcagccagagttgattgtgtatactctatgtctgtctaa

SEQ ID NO: 647 - DNA, 401 bp, Homo sapiens
ttttgggaggctgaagctagagattgtttgagcccaggagtttgaggctacagtgtgctatgattgtgtcactgcactccagcttgggtaacggagcgagatcctgaaagaaggaaaaaaacaaatacaagtctgccataccttatccataaatttgaaaattcaaatagctctgtaaactgaaagcagttttttggagtktggatgcaaaaccccatctgaactgactgaatcttttatttttcccatttagtgtgaatatttaatgtttgattatagggaatggccccatcgctgctggggtattatataatgtatgatatatttatgtatgtacagaattatcttttggggggataattattttaatttattcatcattttataacttaatattatga

SEQ ID NO: 648 - DNA, 401 bp, Homo sapiens
ttttgagacagagtttcactcttatcacccaggctggagtgcaatgacgtgaattaaatggaattatatatactttatgacctttcgtgtctggcttctttcacttagtgtaatattttctttttttgaaataaggtcttgctctgttgctcaggctggagtgcagtggtatgatcatagctcactgcagccttgaactcytgggctcaagcaatcctcctgcttcagcatcccaaagtgctacgattacaggtgttagctaccacgcctggccagtgtaatatttctagattcacccatattgtagcctgagtctctacttcattcctttttaagactgaataatattccatgcctggatataccacatttaaagaatccattcattagttgataggcat

SEQ ID NO: 649 - DNA, 401 bp, Homo sapiens
ggagtcatgtacatgtttttgtgtaaacatacatttctgttctcctgggtataaatatacccaggaattgctggatcatatggtaactctatgttacctttatgaggaactgccaaactttttcacagctggtacaccatttttcactctcacagcaatgtatgaaggttctggtttctccacatcctcaccaacacttgytattgtctgtctgtctgatcatatccatcctagtgggtgtgaagtgctatctcattgtgattttgatttgcatttccctgatggtgagtgatatttagcatcttttcatgtggttgttaatatatcttctttggagaaatgcctattcagctctttgttcgtttaaaaattgagttggctttttattgttgactcataag

SEQ ID NO: 650 - DNA, 401 bp, Homo sapiens
tgaagtagaggtccaacttaattctttagcttgtggatatctggttgtcccagtttttgttaaaaaaactgttccctctattgatttgtgttggcactcttaacaaaaatcagttgactgtaaatgtgaaagtctctttctagattctcaatatttcattgatttatatgtctagccttattctgaactattttttttttwaagttctaaattctgaaacattttcccccagcggcttagggattaggtaataatagtagattgctactgagccatggggagggctgtttctccaactcctcagatatccctgtgcttaccttcccagcctgtcttcctgtgtgagctccatggcacaccctagggacagtgtctgaggacagtgctgaggctcatggcca

SEQ ID NO: 651 - DNA, 401 bp, Homo sapiens
ccaggcgaggcacagtgagctgaagcaggtgactgtactaaatactgcaggcaattgtaacccagtggtatctgtgtacttgaactgtatctaaacataaaaaagggacagtaaaaatacaacataaaagattaaaaagggtacccctgtatagagtacttagcataaatggagcttacaggactggaaggtgttctgggygagtcagtgagtgagtggttgagtgaatgtgaaggcctagggcatgactctgcactcctgtaggctctacaaacaatggacacttagacaacactaaatttataataaaaacatttttctttaataataaattaatcttagttcactataacttttttactttataaactttaaaattttttaactttttgactcttgta

SEQ ID NO: 652 - DNA, 401 bp, Homo sapiens
tgactcgcccagaacaccttccagtcctgtaagctccatttatgctaagtactctatacaggggtaccctttttaatcttttatgttgtatttttactgtcccttttttatgtttagatacagttcaagtacacagataccactgggttacaattgcctgcagtatttagtacagtcacctgcttcagctcactgtgcctygcctgggggtattttttttattatggtaaaaaatatataacatttaccattcccatttttaaatgtacaggtttgtagcctaggagcaataggctatttcacacaacctaggtgtgtggtaggctctgccatctaggtttgtgtaagtgctctctatgatgtttgcacaaagatgaaattgcctaatgacacatttctca

SEQ ID NO: 653 - DNA, 401 bp, Homo sapiens
atcagcagatgtgtttttcctctggcatgggaggacagaagggaagagaaacagtatagttatctaagtgagaatgagccatgaaggctgagtagcggttttctgtgcaagtaaaatcttatcttgggggatagagggaagaccatcttcccccatcccccaacttgaatgaagaagaaaaaacccaaccaaaaatgacawaaagctaagctgccacaaaggctgcacttacccaatattcctggtgtggaggtaagttttgcaccccaatttctcctctcttccgtcttgggacgtgaaatcttttcagctcataaaaaagacagggtgcccacatggtgtttttaatggagaaaataaggctgggaggtgtctgagcctcttgggacttccggagagct

SEQ ID NO: 654 - DNA, 401 bp, Homo sapiens
acaaaatacatatgtgcaagaaaaagactagaaagaaagacattaaatgttaacagtagctaacattaggggctaagatctaggtgacttttaatttccttttataaagaattttttttccccaaggctttttctttcccaatgttattttctaaaatttctacaatgaacattattagttgaatagttaccctcctcccwcctcgctcctccttcttggagctggtcagccagtgctgcttttctcctcctcccacccctccccttctcccacccgagcactgtggctggtttccagtagcagcagtacaattaatattttacacgatcttcgcctaaagtctggtggtagtttgagatacttcttttagtctgaactcattttcaaatttagggcccag

SEQ ID NO: 655 - DNA, 401 bp, Homo sapiens
atttttagtagagacagggtttcaccatattggccaggctgatttcgaactcctgacctcaagtgacctggccatcttggccacctaaagtgctaggattacaggtgtgagccactgcgcccggccggaaatacgcatttttacatctctgatccaatttcttctcagaaggctgtaccaatctacactcccaccattaayggtacgagaagaccagtgccactgactccatgactgactggcctctttctttcaagccccgtttcttgtcatggcccagggtagcaacaatctgattctcacctggatgctgtgttctgcatcatcatcagtaaatggagctcagggttgaggtctgccccaggtcccccggttttggtaaatcttatttctgatgggaa

SEQ ID NO: 656 - DNA, 401 bp, Homo sapiens
gggattacaggcgtgagccaccgtgcccagcctaaaaatattattttaagtgagttaccaccgaggaaaagtaaagctttgtctaaaatctcagggctacgtttatcttacgactttctgtgcctgacaccatcatacacacctgggcttataaacttgaatttgaaaagtctagcttcaagatcagtcagctttcactcwggatatatttattgtccgtctgctatgagccagacctccagttctgtggcggtaacacaaggaaatctttctccaaactctaacatgaatctcttttttttttgagatggagttttgctcttgttgcccaggctggagtgcaatggcgcgatcttggctcaccgcaacctccgcctctcaggttcaagtgattctcatgc

SEQ ID NO: 657 - DNA, 401 bp, Homo sapiens
ggattacaggcgtgagccaccgtgcccagcctaaaaatattattttaagtgagttaccaccgaggaaaagtaaagctttgtctaaaatctcagggctacgtttatcttacgactttctgtgcctgacaccatcatacacacctgggcttataaacttgaatttgaaaagtctagcttcaagatcagtcagctttcactctkgatatatttattgtccgtctgctatgagccagacctccagttctgtggcggtaacacaaggaaatctttctccaaactctaacatgaatctcttttttttttgagatggagttttgctcttgttgcccaggctggagtgcaatggcgcgatcttggctcaccgcaacctccgcctctcaggttcaagtgattctcatgcc

SEQ ID NO: 658 - DNA, 401 bp, Homo sapiens
cgcctctcaggttcaagtgattctcatgcctcagcctccccagtagctgggattacaggcatgtgccaccatgcccggctaatttcgtatttttagtagagatggggtttctccatgttggtcaggctggtctcgagctccccacctcaggtgatccgcccacctcggcctcccaaagtgctgggattacaggcatgagcyaccgcgcccagccttctaacatgaatctctttatggccatgtttttacagatccccagccatgccttgggcaggtaaggaaagaatgctagctgaaacgatggggagaattatgtctggcagtatggaattgggcaaaaatgaattggatgcaggtttcccgcagaacaatcgtgagactgttatggaataagcctttgt

SEQ ID NO: 659 - DNA, 401 bp, Homo sapiens
cagtgagaccctcccgagctcagtgagaccctcccaagttggtgcttcactgagacccacccagccatttttgcctgatcaagtgacagaatggttcaaaactgaattataaaagacttatttacctggatgataatacaaaagaaaggagcccaattgttacacttccccattaggtacttttgtctgctgcgtgacggrcttccctagaagagttgttcaaactgaagttgtgaagttgtaggttataaggcagatttgattcactgtttactaattctgtgtgacttgatataaggttggtgctcaaaaagttgaaggaattttaactagttgaaggaactagttaaaattaattaaagtgaggataggcacccttccttcattcagttatccccttg

SEQ ID NO: 660 - DNA, 401 bp, Homo sapiens
ggggccccttaagagccctagttcaagaaaattgcatctttggatatcagagtgaagaagagtacttctactgctataattcagggcttcttgcttaattctgaaccatctaacctagctcaatttgagtaagagtcttataaaacagtatttaaagatggccagccctcccttcctgctcccctctctccctctatttcycttcttccttctctctcttcctccctccatctctctctttccctcccccctccctccattttcttccctccatcttcctgactccttgctttcaattgtctggcttcagtttcccttggctctgtgagagcaggtctctggagtgtgttgcccatcttgtggctcccctaggaggttatgttaactgtgaactatgaaga

SEQ ID NO: 661 - DNA, 401 bp, Homo sapiens
tgtatcgtgaatcttaaagagtgaggtacagtgtttgtactaggtgagacttttcttggaaacctggtttaggcaaggtagacagctcctgcagaggcatgaagctttgaaagaccatggctaattcaggaaatggtgggtttgtgtgtctgagtagagggggagtgtaggaggggaagacagtgaagagatgtggggaayttggatggtatgggccagcttctgggagaactcctttgggtgctaggtaaggctaggcgccagtcttactcaaactacagtcattttagaaccatcttcacatctctcttacaggctcaatgccatatatattctgatttaatatatttttataatccaatttttaaattgtagataatcataaggaaattttgcatcac

SEQ ID NO: 662 - DNA, 401 bp, Homo sapiens
gctctaggaaggctgttatgaatatgaggtatctagagataacatactgttacttgacaatacaacatgtaaaaatttagactgaccaaaagagaaatacatatacttcttttttttttttctggagacagagtcttgctctgtgatctcagtacagtggtgtgatctcggctcactgcaacctctgcctccctggttcargtgattcccatgcctcagccccccaagtagctgggactacaggtgcatgccactgtgcccagctaatttttgtattttttgtagagactgggtttcaccatattgcctaggatggtctcaaactcctgagttcaggcaatttgcctgcctcagcctcccaacatgctaggattacaggcgtgagccaccacacctggcaa

SEQ ID NO: 663 - DNA, 401 bp, Homo sapiens
tgctttaaaatggtttgggaatcctttttatatatcagcattatatatattcacatatatgtatatggaaagagaacgagaacatgcaggaatgcacacaaatgtagcatactgctaacagctggcagcagtgaggcgagggctgtgctgtgttcagtattctgttctttcagctaattttgtaatggtggcccaggaatsatgaacatttgagaaccattgtgctgtgggactttccttcaggtccttttgaagtccttgctgacttttcatttctggaacatatctttaattttgtattataatttgataagaaaaatttttgacctaagaaaaatcattcagtgacacatactaatataatgtaacttggttagaaaatatgatatgagatcaaaaaa

SEQ ID NO: 664 - DNA, 401 bp, Homo sapiens
ttagggggtgaagctccttttgtgtctctctgcctgcatttaagatgagattgagcacacagaggcaacatggccttccctgggggaaggaacctgggtctgaattcagaggacttgggttaggatcctggctccactccctagtgtctatgtgactttggataaaatgatgatgattatgacggtgatggcagaagttawctacttcataggatcctgtctgtgaagtaagggtagtcatagtgcaccttggacagcgttgatggatcagatgagatgatgcacatgagtagtcagttcactggcatggaacatgctataaagctattaaaataatgatgcttgagttgaactgcattgttaaaacatgggctaatacactgtattagtctataatctgt

SEQ ID NO: 665 - DNA, 401 bp, Homo sapiens
gtgaagctccttttgtgtctctctgcctgcatttaagatgagattgagcacacagaggcaacatggccttccctgggggaaggaacctgggtctgaattcagaggacttgggttaggatcctggctccactccctagtgtctatgtgactttggataaaatgatgatgattatgacggtgatggcagaagttaactacttyataggatcctgtctgtgaagtaagggtagtcatagtgcaccttggacagcgttgatggatcagatgagatgatgcacatgagtagtcagttcactggcatggaacatgctataaagctattaaaataatgatgcttgagttgaactgcattgttaaaacatgggctaatacactgtattagtctataatctgtggttata

SEQ ID NO: 666 - DNA, 401 bp, Homo sapiens
aatctcccagcagaagggcttaaggacccgtgaccctttaatgtgttcacgtgcaccttggccattggtttggctctcaggaccctaggcctagaccctctgggcctgctcccttccccagggcctgcctgaacatgttcaaattaatttgacatgtttgaattaaaggaatacacgagcacctggggcatagcaccagcyccccctggtcccccactgcccatgtatataacttgccttggctgtggtcttcttttccacacttgctgtgattattgtcctggggacagtcctcaggggaaacctcagcatcatggggagtagggaggtgtgagtcatgagaaagagtcaaatattaattagggaacatcttctatatttcagggtttgtgcctggaact

SEQ ID NO: 667 - DNA, 401 bp, Homo sapiens
cccagcagaagggcttaaggacccgtgaccctttaatgtgttcacgtgcaccttggccattggtttggctctcaggaccctaggcctagaccctctgggcctgctcccttccccagggcctgcctgaacatgttcaaattaatttgacatgtttgaattaaaggaatacacgagcacctggggcatagcaccagccccccytggtcccccactgcccatgtatataacttgccttggctgtggtcttcttttccacacttgctgtgattattgtcctggggacagtcctcaggggaaacctcagcatcatggggagtagggaggtgtgagtcatgagaaagagtcaaatattaattagggaacatcttctatatttcagggtttgtgcctggaactatgcg

SEQ ID NO: 668 - DNA, 401 bp, Homo sapiens
tgaaggagtgattccggactggccgttggtttgcttgttcattgtttcggcacttaagtgtgctgcgtgtgtcaggagcagggactcagccctcctggagctgacgggctagtaaagaagctggacaagcaagtgaataagaacagagcctcccctaccccaaaggcaaccatttgcaactcttagcttattatttttatrtaatctttacaccatgtttattgtgctactttttgtttggctttagacattatctgtagacttcctgctaaggaacataagaattcttctctttcttatgtcctccttcagttaggcattccctcagaactttcagcacatggtggggcactgtgctctgtacataatgtccagcgcctgccgtcaggaagctcacggtg

SEQ ID NO: 669 - DNA, 401 bp, Homo sapiens
cacatggagttgtggtcagaaatatctgttactgtattaaagtgcagagaacagagctgccaccgcaaatgcaaagagtttaccatttttattactgctattcattctttctgctcatgcatgatatttaggaacaatactgtattccttggacacagctctaagtataaaagggataatttttttcactaatgacttcaracagtagggtagcactgggtcccagggacacactagatgggcactctttcgatattcatttagccaagagtttttttcttttttttttttctagtgtctattacatgccaagcactatgctaagggaatgcagccatttaacaaaacaaataaggtccctgtcctcatggagtttacattctagtgtgagatacaaataa

SEQ ID NO: 670 - DNA, 401 bp, Homo sapiens
tttgcatttgcggtggcagctctgttctctgcactttaatacagtaacagatatttctgaccacaactccatgtggtagcactacaaatctagtcctagttataggattacaactcctggagatgagggaactgaaggacagagagagtgagtaacttaacaaagtcattagctttataagtggtggagcagagacttgawcccagtcattctggctccagagtctgtgctcccaagcaaaggtgcctgagttcctttcaggaaatatctttggagttaaatgaattgaacactttgcttctctagaggtggaaccaggaataatctcaattactcccactcttgagtgctccgtcatggtgtttatgtggctgttcattgtggacagtgccatcactgat

SEQ ID NO: 671 - DNA, 401 bp, Homo sapiens
ccagcacacgtagagaccataaggtgtctttactgtcaaatgatggggcttcacagagagagtcacaggaaacaagagacaacaacaacatactctcagaggtgcggctggcctgcttccccccattccctggtgaagtatggctatggatgctacccgccatgcagtctgaggattcctccacatgcaagaagcctcctrtgccagtcccatagagatgttatgcccttctgctccccacttctaactcactgttctaaggccctgactatgtgcctgcctgagggaaccagtacagaatgatgccagcctgtccctgaatgtgtgctgtcagatcaggcgagaaagggccaacctcccgggagtatcctgcaacagacccggcttcaagcctgtgtttc

SEQ ID NO: 672 - DNA, 401 bp, Homo sapiens
aactggtggagattaaattgcttgctttgcgaggtgagctgagaaagtttccttcacccaggagaggacagaattcctgagattgcatggattcagatgcaggcctcatatcttcatcactggtgctaatggaaatcctcagccaagaaattaacatagaaactggtgactccttatggccctgggctgccgtagcccctsatctccctatgggggtgcctttacagttgcacacatgtgcaagcccccacagaaaacaacgtttgctgaagaggagtttacagacaaaattacatggcatacaggaaaaattaccaccatgagaaagagaatctatggattctcaagtgggaaaactcagatcctggaaactagaaaccataaaacaatctgaaagagaa

SEQ ID NO: 673 - DNA, 401 bp, Homo sapiens
ggaatagaaattatagcaagattaggacattatgaaaaaagggtagataaatttgaaaacaaaccaaaaagaaattctaagtattaaaaatgtattaaaaatgcagtcattgccatgtgctttcagattaattatcttattaatgcttcatggaagttagggtaggtagttttattcttcgtgtgttttttcaaagttttktttttttttttttttttttttgagacagaatctcactctgtcacccaggctggagtgcagtggcacgatctcagctcactgcaacctccccctccggggttcaagcgattctcatgccccagcctccccagtagctgggattacaggtgcacaccactccagccagctaatttttgtatattagtagagatggggtttcg

SEQ ID NO: 674 - DNA, 401 bp, Homo sapiens
tttttttttttttttttttttttgagacagaatctcactctgtcacccaggctggagtgcagtggcacgatctcagctcactgcaacctccccctccggggttcaagcgattctcatgccccagcctccccagtagctgggattacaggtgcacaccactccagccagctaatttttgtatattagtagagatggggtttygccatgttggccaggctggcctcgaactcctgacctcagatgatctgcctgcctcggcttcccaaagggctgggattacagatgtgagccactgcgcccagcttaaagtatttttttttactatagaagtactcatgtatgttgaaaatctggaaaatagagcaaattataggaaagaaataagaataatttgttaacct

SEQ ID NO: 675 - DNA, 401 bp, Homo sapiens
ttataggaaagaaataagaataatttgttaacctgttactcgggttaactattttggcatttttttcctagtagggattctactgggtataaaattttagatccttatttaagcaaagttttgaaccatgagccttcttctataccataattaaattttctctgaaaacatgtttaatggctctgtattattttattgtcytgctctaccatactttatctgtctactcttgatgaatgtatgcactgtgtacaatattacgcactttaaccacaacatgttgaacatttgtttgcatttcagattattctttagagcagattaccaaaaatgagatggcttgatttatgggtggggccttatattctgtaaaggaaggaagggacaggaatatatgaaca

SEQ ID NO: 676 - DNA, 401 bp, Homo sapiens
actcatggtgggcccttggggcacagctgagtttatgctaaggagatgactcaagatggggactggtcatgcctgaaagaccaaccatgtcattagagggttaggcctatgggccatatgatatcaggctgacctcctgacctctggggagctggaaatttagtttagtctcatggctagtaattcaatcagtcatacctrtgtaatgaaaccccagtaaaaactctggacactgaggttcagggagcttcctgattggtaaacacattgatatgcccagagggtgattttccctgactgcacagggagagggcaccaaagctctgaatctagggccctcccaggcttcaccccatgtgtctcttcatttggctggtcctgattcttacccttataataaa

SEQ ID NO: 677 - DNA, 401 bp, Homo sapiens
ataaattgtgtccctcacaaggacccagcattttctgttccttgggtgggccacatgtgctcttgagaagattgggaacagctgtactgagttgttgccattgagtcatatctggtccaggggccagcggttggtgcctctggtcattccgtccttttctaacaaagctcgaggtgatctggccatctccccaaagatccyggggaagtgcatgctcagcatcctccgtgcagcactggcagctggggcttccgtagccccctgctgtgtcctgtgccctgaatggccccttcccttagctttccggcctgctccctccctccagttgctaaattcccctcttctatgcttgcttagcagaaacttctcatttaacttttacatacttcactgtgttgatg

SEQ ID NO: 678 - DNA, 401 bp, Homo sapiens
gcattttctgttccttgggtgggccacatgtgctcttgagaagattgggaacagctgtactgagttgttgccattgagtcatatctggtccaggggccagcggttggtgcctctggtcattccgtccttttctaacaaagctcgaggtgatctggccatctccccaaagatcctggggaagtgcatgctcagcatcctccrtgcagcactggcagctggggcttccgtagccccctgctgtgtcctgtgccctgaatggccccttcccttagctttccggcctgctccctccctccagttgctaaattcccctcttctatgcttgcttagcagaaacttctcatttaacttttacatacttcactgtgttgatgttgtctgtatgtgtgtgtgtgtttccc

SEQ ID NO: 679 - DNA, 401 bp, Homo sapiens
aagcatacataacctttttaagtgttactaggatgccaccactgaggactagagaagagttgattaattgttgctggagggggtgttctaagtaattgaacaggcccggtcatctctgacctctcagtgcttttcattcacttcatacatatttgttgagcacctattctctgctgccatgtgcaagggattctgtgggayaaggtggcccaggtccctgtcccagtgggtgaagctgcagaggagcttgggagtcacaaacagcactatcctagggcaacagggattgtggggctctgaggaggggctgtcacctccagatgagagggagcctggaaaatacctgggaggtgacatctagccaaaatttgaaggctgggttgccagagaaaggacaaggt

SEQ ID NO: 680 - DNA, 401 bp, Homo sapiens
tgtcagagactgtttggagctttcacatgcattaactccttcagtcctcctaacagtctatgaagtaggccctgtttttacacagcatatgtatactgtggctatgatactaggtgtggggcctcggtccagagtgttggggagcgagtgtttggcagcctctgcacggccttttcatcagctttggaagaagccaaggcyagagagcgaagtgctctccccacgtggccccactggaggggcaagggctgagtgagattcgtctgctctcatttggaccccagagagcccattgtcctttcctccaggatgaccctcctggcatccaccttccccacccccaccatgggcaaaacatgtctcatgggagaaagaaggagtgggctgtcaaatctgcccta

SEQ ID NO: 681 - DNA, 401 bp, Homo sapiens
tgctcatgtgaggtgcccaccagccctggagggtttcctttcctttccttttcctttccttttcctttcattctctttcttttattttttctttctttatctctctttttcttttcttttcttttttcttttcctttctttcctttccttttctttctcgcccgctttctgtcattctttcgttttttcattcattcattytttctctccctccctccctcccttccttccttttctttattttctttcgagacaagatcgtgctctgtggcccaggctggaatacagtggcacgatcatagctcactgcaaccttgaactcctgggctgaagccatcctctccttcaaccttcagagtagccaggactacaggcatgtgccactgcacctggctaatttt

SEQ ID NO: 682 - DNA, 401 bp, Homo sapiens
ttctgcacctgtgtgtgtgaataataataaatgtttccttcctgggctattaagattaattgaaataatgtgcctggtgcattcttaagcatgcaatatgtgttcattctctttcttcctttccccgattccctgacctgtagtcatctttttatttatttatttatttatttatttatttaatttatttattttgagacrgagtcttgctctgtcgcccaggctggagtgcagtggtgtgatcttggctcactgcaacctctgcctcccgggttcaagcaattctcgtgcctcagcctcctgagtagctgggattacaggcacacaccaccatgcctggctaattattgtatttttagtagagatggcatttcatcatgttggccaggctggtgttgaac

SEQ ID NO: 683 - DNA, 401 bp, Homo sapiens
ttactgtaaccatgtctggctagaacttaataacagtgttttacttttattgtacttctttttttaaacttttcacttatggtaaattatgctggttttccagtgatatgaagctttacttttacttacttacttatttattttattttatttttttgaggcagggtctcattctgttgcccaggttggagtgcagtggcrtgatcttggctcactgcaacctctgcctccttggttcaagtgattctcctgcctcagcctcccatatgtctgggaccacaggtgcacaccaccacacccagctaatttttgtattttttttttgtagagatggggtctctccatgttgcccaggctggtcttgaactcctgggctcaagcaatccccccacctcggcctc

SEQ ID NO: 684 - DNA, 401 bp, Homo sapiens
ctctctgaccccaaggtccacatctggaaacagggacaatcacataattgtgataaagggacaatgggtagccatctagataaaaataaaattggatgtctaccatacacatgacatcagaataaattccaaatggatcaaggtttcaaacataaaaacagaaaaccaaaaaagtactgaaagaaagggtgagaaaaaaawtttttataatcttaaaagtaaaaaaatacctaggtaagatacaaaacccacagaataaacacagaagaaaataaaaaggaaacactgacaaattcaacaatataataaccaaatatctctgtataggaaaatacgataaagtccagtgacaagggagagaagcttaaaatgcatactacatacaaaggactgttttcctt

SEQ ID NO: 685 - DNA, 401 bp, Homo sapiens
gcccaacagtcaacagcagaggcagcgctagtaccaagggctgtctgacttcaaaatttctgctttttctattatcagctgcctcttggccagaatcatgcattcctgagtgctctgggaaccctaaggcatcccaaagagcaggtgggcaaggccctgaggatagagaggaaggagaacaaagtgcacaacctgaggcayagtcctgcaggagggagccaaaggagacattcatcaccacctgaagaaaggccagggtgaacaatgagagcatgtcagcagtggaggaacaggaggaacaacaaagaaggtccatgtaagacatcaaggcaaaaaataaatggccctggacaagatagcagacaaatagaggtgttggacccccgccaaaaggaaagaaa

SEQ ID NO: 686 - DNA, 401 bp, Homo sapiens
cactctctctcagcctttctgcttagccctctcactgaagccaaacattcatgctgcccatgctgctaacaaccaccaggttactccatcgactgcaggaggtgctaggagtttaacaggctagaggctcctggccaggcccagaccctccagtggggaccaggtggccaaaggaggccccagtcacaggagaaggctccrgggaccctggtccttgttatcaccattttcatgaacagtttcagatggaggggagttttataaagctattcaccctctctgtgctccatctccacatctgtaaaacagaaacaataattgcatttctgttttctactgacagtggtgtctaccactctagttggaaactcaggttcctgtagaggagacagcccagaggg

SEQ ID NO: 687 - DNA, 401 bp, Homo sapiens
ctttccccttccccaactccatcagcaggctttgtccacttgtgtttgcctggggtctgcctggactagtggggacagcaggccttgttacagttcgaccaagagtgatggggcccaggttcagtgctcacagctgttagtaccagctcctgcttactgagggtgcttagggctgagtctctcctaatcttctgcaggagrcatctttgtttaggtcctgattgtggatgaggaaattgaagctcctggtaaggttgtgatttgaacatatccaagcttggggacctccaagccctgctcttgccacttcctcttatttgtggtccttgtttccttggtctttaaaatgaccctcttgtttaagccccttccatttccaaatcctctgagcctgtgctgag

SEQ ID NO: 688 - DNA, 401 bp, Homo sapiens
ctgtgttggatggagcctgatcagtcctgggttcttgcccctagttgggtggctttgggcaagttatttaacctgtctcagcctcagtcttcttacctgtataatgaggagataggcaatacattgaataaatgaataaaaacagctgcaaataataatataaggctctcgccctggagtctgagaagctgtgttctgagktggggacctctgaaacctgcccgttttgtcctggaacacccgcagggggcttgtacagagcaattgttttattctggacataagatcttgctgctcagagtttcagggtactgttgtagagcaaaatcagtagactgagttcaaatccctctgaatccttgctccttgacctgacttggttacttcacctctctaagcct

SEQ ID NO: 689 - DNA, 401 bp, Homo sapiens
tagttgggtggctttgggcaagttatttaacctgtctcagcctcagtcttcttacctgtataatgaggagataggcaatacattgaataaatgaataaaaacagctgcaaataataatataaggctctcgccctggagtctgagaagctgtgttctgagttggggacctctgaaacctgcccgttttgtcctggaacaccygcagggggcttgtacagagcaattgttttattctggacataagatcttgctgctcagagtttcagggtactgttgtagagcaaaatcagtagactgagttcaaatccctctgaatccttgctccttgacctgacttggttacttcacctctctaagcctttgtcctctctctctctctcttttttttttttttttttttt

SEQ ID NO: 690 - DNA, 401 bp, Homo sapiens
cccgttttgtcctggaacacccgcagggggcttgtacagagcaattgttttattctggacataagatcttgctgctcagagtttcagggtactgttgtagagcaaaatcagtagactgagttcaaatccctctgaatccttgctccttgacctgacttggttacttcacctctctaagcctttgtcctctctctctctctytttttttttttttttttttttttgagacagggtctcactctgtcacccaggctggagtacagtggtgtaatcaggccttgacctgcagccttgacctctctgggcttaggtgattatcctaccttagcctcccaagtaggtgggattacaggcatgcaccactatgcctagctaatttttgtattttgtatagagacagg

SEQ ID NO: 691 - DNA, 401 bp, Homo sapiens
tcaagaccagcctaggcaacatagtgaaaccccgtctctacaaaaatacaaaaattggttcagcgtggtggcacacgtttgtaatcccagcactttgggaggctgaggtgtgtgaatcacttgagctcaggagtttgagaccagcatggggcaacatggtgaaaccctgtctctatacaaaatacaaaaattagctaggcrtagtggtgcatgcctgtaatcccacctacttgggaggctaaggtaggataatcacctaagcccagagaggtcaaggctgcaggtcaaggcctgattacaccactgtactccagcctgggtgacagagtgagaccctgtctcaaaaaaaaaaaaaaaaaaaaaaagagagagagagagaggacaaaggcttagagaggtga

SEQ ID NO: 692 - DNA, 401 bp, Homo sapiens
gagtacagtggtgtaatcaggccttgacctgcagccttgacctctctgggcttaggtgattatcctaccttagcctcccaagtaggtgggattacaggcatgcaccactatgcctagctaatttttgtattttgtatagagacagggtttcaccatgttgccccatgctggtctcaaactcctgagctcaagtgattcacmcacctcagcctcccaaagtgctgggattacaaacgtgtgccaccacgctgaaccaatttttgtatttttgtagagacggggtttcactatgttgcctaggctggtcttgaactcctgagctcaagtgatctgcccactttagcctcccaaagtgctggggttacagacccagcctgttttcccatttgtaatacccacat

SEQ ID NO: 693 - DNA, 401 bp, Homo sapiens
cttgacctctctgggcttaggtgattatcctaccttagcctcccaagtaggtgggattacaggcatgcaccactatgcctagctaatttttgtattttgtatagagacagggtttcaccatgttgccccatgctggtctcaaactcctgagctcaagtgattcacacacctcagcctcccaaagtgctgggattacaaacrtgtgccaccacgctgaaccaatttttgtatttttgtagagacggggtttcactatgttgcctaggctggtcttgaactcctgagctcaagtgatctgcccactttagcctcccaaagtgctggggttacagacccagcctgttttcccatttgtaatacccacattgcagagttggtgttgagatgtaggtaagaggaga

SEQ ID NO: 694 - DNA, 401 bp, Homo sapiens
agcaagactccacctctacaaaaaaattttaaaaataagctgggtatggtggcatgcacctgtagtcccagctacttgggaggctaggacaggaggatcgtttgagcccaggaattcaaggctgcagtgagctatgattgcaccactgcactccagcctgggcaacagtaagaccctgcctctaaaattaaaaaaataaawaaataaataacaaataatggcacacatttacctacataacaaacctggtcatcctgcacatgtacccctgaacttaaaatataagttggaaataaatttttttttctttattttaaatgtaacattttttctccttcttataatgcccatagctttgacttttttaaaaaaaaatctgattttgaggttgctaaaatatg

SEQ ID NO: 695 - DNA, 401 bp, Homo sapiens
tgagctatgattgcaccactgcactccagcctgggcaacagtaagaccctgcctctaaaattaaaaaaataaataaataaataacaaataatggcacacatttacctacataacaaacctggtcatcctgcacatgtacccctgaacttaaaatataagttggaaataaatttttttttctttattttaaatgtaacattwtttctccttcttataatgcccatagctttgacttttttaaaaaaaaatctgattttgaggttgctaaaatatgttcaaagtataatgttaagtttctccagctgaaatatttttttctgaacatattttattccttcagtcccaaaaggaaaattacacctcacagataacttatgctttgttaaatgctgacccttgta

SEQ ID NO: 696 - DNA, 401 bp, Homo sapiens
tgggcccccaacgtgttcctccctccttgttccctgctgggctttatctcatcctgcctcaagacccagtctcacagccctgtggccagttcccagatttactgatggttaggacccggaagacagttgggtgtatcttctgggtagggaaggcttgggctcagcttgtgtgagggaggcatgagtgtcatggggccatgsagagagggcgaaaagcccaggaaagggtttgtggagcacacagcatggtgcttggcacaaggtgagtgggaagcaactggtagttaaaaaacagggagcctcccacagccacattggggagtcttttttttttttttttccagtggacagtggggctcttagcatgagaagggcatggtcaggtctgtgttttattgtat

SEQ ID NO: 697 - DNA, 401 bp, Homo sapiens
gggcccccaacgtgttcctccctccttgttccctgctgggctttatctcatcctgcctcaagacccagtctcacagccctgtggccagttcccagatttactgatggttaggacccggaagacagttgggtgtatcttctgggtagggaaggcttgggctcagcttgtgtgagggaggcatgagtgtcatggggccatggrgagagggcgaaaagcccaggaaagggtttgtggagcacacagcatggtgcttggcacaaggtgagtgggaagcaactggtagttaaaaaacagggagcctcccacagccacattggggagtcttttttttttttttttccagtggacagtggggctcttagcatgagaagggcatggtcaggtctgtgttttattgtatt

SEQ ID NO: 698 - DNA, 401 bp, Homo sapiens
acaggttgaaaataagaatataatgctataatgccatgacagaatactatacacccatttaaaagaatgaagaagctctttatctaccactatggaatgatatccgaggcggagtgagtgagaagggcaaggcacaatgtgcagagtgtgatttgtgttgaaaaggggataaggtatacgtgtgtgtgtatgtgtgtgcaygtgtgtgggtgtcacatactgcataagtatttgcttcgacacacataaaatatctctgagggaatgcaaaagaaactaatgacttggttgtctgctgggagaccaaagatgagtaggaaggaaattctctgtacattcttcggttccttttcattttaaacagggatgtgtagtatctgttctaaaataaaattataatt

SEQ ID NO: 699 - DNA, 401 bp, Homo sapiens
tgcctgtgcttttggagtcatatccatgaaactgttgccgaatcctgtgtcatgaagatttttatccagtgtttttttctaagaattttgtagctttagctcttaagtttaggtctttgatcattttgagttaatttttgtatatgatgtaagttaagggttcaccttcattattttgcatgtggatatccagttttccargcacttttgttgaaaagattgtcttttccccttttaactttgtaaaaaatcgattgaccatatatgtgtgggtttatttctaggctttctgttctattccattggtctatatgtctgtccttaggctagtgccacactgctttgatgtctgtagttttgtattaagtttcaaagtcagaaagtatgactcttctctcttt

SEQ ID NO: 700 - DNA, 401 bp, Homo sapiens
gtccattgtggtagtggaaaaggtagcatacctttcaatctattttctctgtaattgagatagaattcacatactatgaaattcatactttcaatgtggaaagaattgtacagccatcaccactatctaattccagaacattttcattaccccaacaggaaattgtattcattaagccctttgctcctcattctctgtgcsccaccagcctgggaactactaatctcctttctgttttatggacttacctattctggtatttcatataaatggaattgcacaatatgcaaccttttgtgtctgacttctttcacctagcacagtgtttttgtggttcatccacactgaagtatgtattgatgcttcatgtctttttatgtcatgtctttttatgtcacaac

SEQ ID NO: 701 - DNA, 401 bp, Homo sapiens
ccttttgtgtctgacttctttcacctagcacagtgtttttgtggttcatccacactgaagtatgtattgatgcttcatgtctttttatgtcatgtctttttatgtcacaacagaataatattctgttgtgtatatatacacaacatagtttgtgtatccattcatctattgatagacatttgagatgtttctactttttgrctattgtgaatagtgctactctggacatgtatggatatgtacttctttgagtatttgttttctgttctttttggatatatatctaggagtggaatagctggatcatgtggtgatcccatgtttcccttcatttttgtaacattttttactgcatataaaattcttggttggtagattttttttatttttatttttaactt

SEQ ID NO: 702 - DNA, 401 bp, Homo sapiens
caattgcctctgattattttcaacaaactcccccagggaaaaggctatttgcactaagcaagctccaaggcaggtcaaataaatatagcattgtgagtagggccttccagggagccaccagactggaaaatcatgatcgttctctggaagaagggctttgaaggagctcaaacccattctgcccctttcagtgcctggcakgctactggttttcaccatgattggttttcaggacagctgcagagttagcataggaagagggcaagttaaaacatcaaaagctcacttggttttactgagactcttcttgaataaacactccacagattgctcaagcctttggttaatttccagagttctgaacaagttgattctgatcatttttgccagtgttctttgtt

SEQ ID NO: 703 - DNA, 401 bp, Homo sapiens
ccacagattgctcaagcctttggttaatttccagagttctgaacaagttgattctgatcatttttgccagtgttctttgtttccatggaagagggcttttcagatgtccttgctgtatcattttgctgatctattagtgagtattcactcttagatgtgtaccccacgaattcatcccacagccaaggcaaaaaaaaaaamaaaacattcatgcccgctgacatgtttatcacagtgtaatttataatagtgaaaaatttgaaatatcacaaataagtaatggaggaaagcatgtacaagcatgtaaattctgggtcgtaccattgtccaggtgtcaacaatgaaagaacaggcccaggtggagagaagtgtgacaaagagactgagagccctggcttcag

SEQ ID NO: 704 - DNA, 401 bp, Homo sapiens
cagcgtccagaaagggaggtttcccctccagcagccccacttgttaaccatgtgatctcaagcccacctcaccttctggagcctcagtttctttatctacacagaagacctacttgggaacacctccttgaggcacatcataggcctccaataaacaggcgctatgagaattagggagagcagcagtcctagaatctgagktgaaagacttggagccgggcggggccaggcagccagaggggaggtggggcggagcaggcagtgggagtcccagggcaggcacagcagcaggctcagcagctgaacagacaaagggacagtccccctcccttgctgccagcgaggaggccagaagggaagacaaggtaagactgaccttgagggcagggatctccacactg

SEQ ID NO: 705 - DNA, 401 bp, Homo sapiens
tctttcaactcagattctaggactgctgctctccctaattctcatagcgcctgtttattggaggcctatgatgtgcctcaaggaggtgttcccaagtaggtcttctgtgtagataaagaaactgaggctccagaaggtgaggtgggcttgagatcacatggttaacaagtggggctgctggaggggaaacctccctttctrgacgctgtacgtcagggtggcaagtatgtgtggagttatttctgggtacctttttcttaaccacagtaatttcaaattaaacatgacgtgaatcttatgatgctcagaatcacagaatctggaagaaatccaggttggttttgcactcctggtggccatcgacagatgccgcattattcttctgaagacctgtgagaagg

SEQ ID NO: 706 - DNA, 401 bp, Homo sapiens
ctttcaactcagattctaggactgctgctctccctaattctcatagcgcctgtttattggaggcctatgatgtgcctcaaggaggtgttcccaagtaggtcttctgtgtagataaagaaactgaggctccagaaggtgaggtgggcttgagatcacatggttaacaagtggggctgctggaggggaaacctccctttctgsacgctgtacgtcagggtggcaagtatgtgtggagttatttctgggtacctttttcttaaccacagtaatttcaaattaaacatgacgtgaatcttatgatgctcagaatcacagaatctggaagaaatccaggttggttttgcactcctggtggccatcgacagatgccgcattattcttctgaagacctgtgagaagga

SEQ ID NO: 707 - DNA, 401 bp, Homo sapiens
ttcaactcagattctaggactgctgctctccctaattctcatagcgcctgtttattggaggcctatgatgtgcctcaaggaggtgttcccaagtaggtcttctgtgtagataaagaaactgaggctccagaaggtgaggtgggcttgagatcacatggttaacaagtggggctgctggaggggaaacctccctttctggasgctgtacgtcagggtggcaagtatgtgtggagttatttctgggtacctttttcttaaccacagtaatttcaaattaaacatgacgtgaatcttatgatgctcagaatcacagaatctggaagaaatccaggttggttttgcactcctggtggccatcgacagatgccgcattattcttctgaagacctgtgagaaggatg

SEQ ID NO: 708 - DNA, 401 bp, Homo sapiens
ccctgctcaccatcttgggcttctgggggcaacatgtcagaaccattgcatactgatggccagcactgcccgttcctttctttcctggcatgcccatcccacaagtgagagaacctagacccgggaaacttaagcaactggacagcagagctgggacttgaagtcattcatccagctccaaagacccagccctggccatgygccctgctgtcacgggagccccagaggagatgcctgggctggtagtggtgcctctactccagggcagggcctgcaggccccatggcagttctgtggccatgctgctgtgctttgctgaggccttgcctgggctgcggcatgtacgagagcccattgcagcagagcctgaggttcagaactcctgacctcctctcacccct

SEQ ID NO: 709 - DNA, 401 bp, Homo sapiens
cacacactcaggtggcaccttccctggcataatccccacagctctggctttccattttctccttcaaatccaagatgcagtgctacttgtggttgactcctgaacatcacgctatcgaaggatccgtcctgacagtggaacacccctcccctggcagcggcttgttacctgactctggccaatgatatgtgaagggacatstcctaggggtttggggaaaagcttttctgctttttggaactcaacaggaaaagacagcttttctccttcactggacattgaagggaggaaggatgtgacgcctggactcaggggctgaacggccaccttactcccaggctggaggtttgcagaggctgggaggcaggagagttgcccagaagcagagcctgcacctgagg

SEQ ID NO: 710 - DNA, 401 bp, Homo sapiens
cttctacaggggatgtccagaggccagccacactccctacccgcgccacatttggcacctccacatctgctcccccagcaaccactgagtgctgcctgactgccagggctccatgtagagggtgcaggggctgaggcttcctgtggtgactgcgcccacatgcgtgcgtgctctagagcagcttgcccctttcctcctccyctttgctgcgactcggaggaaggcagcatggtcaaccccactgatagacaaggacgctgaagctcagtgtactcagggaactcacttgagctcacagggccagcacataggtacaaacccaagcccagttgctctcgaagccctgctgtcacttctttgtaacactgcccctcagctggaaagggcagggtatgcttgag

SEQ ID NO: 711 - DNA, 401 bp, Homo sapiens
ccagggtggccttgggacactcccagggcagctgtagcaccctacaagttgtcgtatgaaaaccactctaacttatacgtgcttttgggtggaattaaatgagttttattgtttctaggacaagatagggatttgattagaaacaacatttatggaatgccagggctggttcccatccactgtgccctgcaggaacacagrgtcttgggtcccaggcataaacggccagctgtgtgactggggcaagacacgcccctctgtatggccaggccaccttcttaaataagtaagaacagccttcaggtgggaatggttcttcccaagggccatttgctttcacaatcttgtttaccttcagtggtcagttaagtttcaaggggaaactgtgactcaggccagtg

SEQ ID NO: 712 - DNA, 401 bp, Homo sapiens
ctctgcaaggagctccatgtttacctcagtcatgccagacactctctcgcctctgggctttagcacatactgttccttctgctcagaatgcctgggcaaagccctctgccttctctgagactcagcttcagtcgccttgcctgggaagcagggttggagcccttccagtgcccccaccacactctggaagccatgttcacycagtgccttccccatatgaagaaacagctgcctgcctgaccaccccagccccactgagggctcccccagggccagcttgggctctgatacctgtcagggactccagtccccgacatgacacgcatcaacagtatctggaaaggttgtgggcagggctggcttcatgggtgtgcaagctgaggtcacacagccctgcatgg

SEQ ID NO: 713 - DNA, 401 bp, Homo sapiens
ccaggccagagggtgagagggggcaggcagagccgctctgcccagaagggtctgcttcctcaagaagaggttgggaggccaggctccccagtacttgctgtgcttagcctggatgcatgccctggcctccagccctgctgacctcctgcctgtcccacagcgtctccccttccctcctggtggcagaatgtgcccagcatkcccacactcttctcccaggcctctgaatggctgtaccccttcattgctcaagatattcatatctccacctccaagagagctctcttggcctacagaacccctcccattctcaatcgcctcactgtaaggtaaataaggtgatttaccaactcatacccctactggtagaaggtgaactgtaagaacagaaatgggacctg

SEQ ID NO: 714 - DNA, 401 bp, Homo sapiens
agggcaggcccctgcccacccccttgcagcctccaatgctgctgctgtggcagctgctgctgcgaaacaaaccagggtgactgggcggaaggtcaggagtttaagagcttgtttgattcaaaactaggctaaaagacaggaggggagtgagctggttttctgtgtggatcctggtattttcctttgagttggggaggagartggtggggcagggagggaaggccggccgccagagggaacgctgccaagcagagcgcagctaatgtgaaccatacggcggcggcgttgggcagtggcggccatctcccgcccagcttagtacagcccttactgcgggcaggggtgcagacaggcaggaaggcagctcgggctgtgcggccacttaacccttccagtgctga

SEQ ID NO: 715 - DNA, 401 bp, Homo sapiens
gcatgcagaaagctgggccatggaggagccaaattaggggccagctccagggatgttataaaccattgctgctcacaggacaggcacagaagtatgctcagaaggagggtccgatccacatttaaaatatgtgacttaacttctctggaccttggattcccctcacctgttaaagggaagaagctcctgctatggtgctgyggggagagcaggctttccatggacaggaaattatcactgtcaccacctgcagagacctgtttgcctaggctgaagcggagggggtaatgaaagagtcagcaaagatggcagctgctgtgaaagggacgaaagtatttgtatatgataatgtgcaggcagcctgggacagcagggaaggtcaccaaacaatgcggcctcag

SEQ ID NO: 716 - DNA, 401 bp, Homo sapiens
tacaaatactttcgtccctttcacagcagctgccatctttgctgactctttcattaccccctccgcttcagcctaggcaaacaggtctctgcaggtggtgacagtgataatttcctgtccatggaaagcctgctctccccgcagcaccatagcaggagcttcttccctttaacaggtgaggggaatccaaggtccagagamgttaagtcacatattttaaatgtggatcggaccctccttctgagcatacttctgtgcctgtcctgtgagcagcaatggtttataacatccctggagctggcccctaatttggctcctccatggcccagctttctgcatgcagctgctctggggtccctaggagtgattgcagcccctccagggtcacttccattttagct

SEQ ID NO: 717 - DNA, 401 bp, Homo sapiens
tttccagtcttagaccaacaaaggcatccacactggggaactgggggaagctaaatcagcacccgcccaaatgggagagggagatccaacatcttaacattatcttcagattttaaaaatgatacatacttctccttaaaacttcaacactactaagaaggaggtacatgtacccttccccatttgctggagagcacgggygctgccatgtatcagcctccctccagcagttcctgtgagtaacatacacggctacaccatggcatgagccttggcagagtcataccaccgtgctgctgtggcacctccagccctccaccccccacacaacctgaatgtctctcctctttcaataatgaagatcctatagtcatgaagctgactgtaaagcccaaagtaat

SEQ ID NO: 718 - DNA, 401 bp, Homo sapiens
aaagctggttatttggaaagattaataaaataaacaaacatctagcaagactgatcaaaataaagagagaaattacaaattaaaaatattagaaataaaatgaagatatcactacagattcaaaaaacattaaaagataataagagtatattacaattaactttatgccaataaatagacaaaaataggctaattccttayagaaacacaacaaaacacacacaagaataaaaatctgaatcatatataatatacatcatatatatatttaaatacataattaaaagactcctcttaaagaaaactatatgccctcatagcttcattggcgaattattccaaactttaaagcaagaagtgataccaactttaaacatattatttcagataataaaaaaaga

SEQ ID NO: 719 - DNA, 401 bp, Homo sapiens
caaaagaaaaaaaatcaacaaagccaaaagctggttatttggaaagattaataaaataaacaaacatctagcaagactgatcaaaataaagagagaaattacaaattaaaaatattagaaataaaatgaagatatcactacagattcaaaaaacattaaaagataataagagtatattacaattaactttatgccaataartagacaaaaataggctaattccttatagaaacacaacaaaacacacacaagaataaaaatctgaatcatatataatatacatcatatatatatttaaatacataattaaaagactcctcttaaagaaaactatatgccctcatagcttcattggcgaattattccaaactttaaagcaagaagtgataccaactttaaac

SEQ ID NO: 720 - DNA, 401 bp, Homo sapiens
ggctggagtgcagtggcgtgatctcagctcactgcatcctccgcctcctgggttcaagtgattctcctgcctcagcctcccgagtagctgggactacaggcacatgccaccacgcctggctaattttttgtatttttagtagagatggggtttcactgtgttagcgaggatggtctcgatctcctgaacttgtgatctacmcgccttggcctcccaagggaagtttttaaaggcattagcaaatataaatatctactaggagagacagacagaaaattagcaaaagaaggagaggatgtccttataggaagcttttctactctgaactgattctctatgcatccacaactgccttcacctaggccaacacctgctatcatctgcctatacacattttcaga

SEQ ID NO: 721 - DNA, 401 bp, Homo sapiens
taacacagtgaaaccccatctctactaaaaatacaaaaaattagccaggcgtggtggcatgtgcctgtagtcccagctactcgggaggctgaggcaggagaatcacttgaacccaggaggcggaggatgcagtgagctgagatcacgccactgcactccagcctgggcgacaaagcaagactctatctcaaaaaaaaaaamaaaaaaaaaaaaaaacttcccttataggatcacattaataacccgagccacagagtcagaaagtgctgccttagaatgccctttgtcactttctggcttgtgaccttgggtgaatgacttcacctttctgagccttagttaatttttctaaaagggtaatgggagtatcttccctgtggagttgttgggagaattaaatg

SEQ ID NO: 722 - DNA, 401 bp, Homo sapiens
  misc_feature (201)..(201): Nucleotide optionally deleted
gtgaaaccccatctctactaaaaatacaaaaaattagccaggcgtggtggcatgtgcctgtagtcccagctactcgggaggctgaggcaggagaatcacttgaacccaggaggcggaggatgcagtgagctgagatcacgccactgcactccagcctgggcgacaaagcaagactctatctcaaaaaaaaaaaaaaaaaamaaaaaaaacttcccttataggatcacattaataacccgagccacagagtcagaaagtgctgccttagaatgccctttgtcactttctggcttgtgaccttgggtgaatgacttcacctttctgagccttagttaatttttctaaaagggtaatgggagtatcttccctgtggagttgttgggagaattaaatgaaatttt

SEQ ID NO: 723 - DNA, 401 bp, Homo sapiens
ggccctggcagagcatgagatttcatcatcctgagcccacactaggatgtcccgatgttggaataccctaaaagctcttctcttggaaaacgtaatccacgtaggatcttgaaatatgaccagcaggatggggcttcctgtccctggtatgcagaaagggtgagtggaggcaggaggaaggatggtgtctgagctggccaycccatgtagctaacacagtccaatgccactctgtcctcatcctggccacccataagcctttcttgtctcctctttcccttcctaccaagtccagcatttgcaagccatcctgatgctggcccttgcttttctctgtagcctcagcttttctcattcttctactgataaagcaaactgtagttctcctgttttctcagcat

SEQ ID NO: 724 - DNA, 401 bp, Homo sapiens
aaagcaggacaaaacccatggccatattaataaaggagggtgaagggaagagctgggttagtgccccttgtctggtgcttcagatggtaggagaggttgatcctgcaggccgactgatttaatgccctgatttccagcttaggtttcatatgccagtcataaagtgtaagaaataaatatcctaaaacaattatttttttwaaaaagtttggcttataagcaaaatatctaaaaacatttctaatttttatacagaagaggaaaaaataatcagataatcattgattttgttttttgtttttttttgggggaggtaagttatatatatggttgggaaattctaacagcacgaaagttacaaaatgaagagtaggagcctctcctcctctatcccaaaccca

SEQ ID NO: 725 - DNA, 401 bp, Homo sapiens
agctcaagtgacccacctggcttgacctccaaaagtgctggaattgcaggcatgagccaccatgccagcctgttgtttgtaattttaatgagaatgtggtgagtgttttatcattaagtaaggtgatggcttttcgatctcatttatcttttctctcatcataaggaaatactcatttatttttatttttttaaatcaagrattatttttaattttggaaaaatcttcatggcgtattttggagtgatttatggtttttgtcttttgaccttttactatgctgttatattaatatgttttctagtattgcattctggaaggtatcctacttagttgtattctggtctttcaataatatttatattattctttcagtaatatttatgtcataattgaaatgt

SEQ ID NO: 726 - DNA, 401 bp, Homo sapiens
gctgagccccattctgggtctgccattttactacagaggagagaatttgaaaggtggtcagaagaagcatggacatgttaaatgtttggaaaccagattcctgtagggaaggagggaaggattttagctccacagttgtgttctgagtgccagctaatggggctagccctctacgtcccactaaaagcctgcatggtcccrtgaccttcagggcacagctccaaacttgaagtgtgtggctggcagcctgtcttcctctgcagccatgcatggggagcttcaggcccacggagctagtttggttccctgtccagcagctgccttgtcctttcaggcttcggtagcactctttcttttgtgacctggggccaaggacttcacctttctgtgcctccatctct

SEQ ID NO: 727 - DNA, 401 bp, Homo sapiens
acagttgtgttctgagtgccagctaatggggctagccctctacgtcccactaaaagcctgcatggtcccgtgaccttcagggcacagctccaaacttgaagtgtgtggctggcagcctgtcttcctctgcagccatgcatggggagcttcaggcccacggagctagtttggttccctgtccagcagctgccttgtcctttyaggcttcggtagcactctttcttttgtgacctggggccaaggacttcacctttctgtgcctccatctcttttcagagtgtttctgagcatacattgattattcatgtgcttggagtgggcactcaggagtgttccttgttgttttgcaagggacgccctttccagccctgaccatttgaaacactcttagaaatatttca

SEQ ID NO: 728 - DNA, 401 bp, Homo sapiens
gtctgcagcccgaagcacaggggtggtttggaccttgctgccaccccgtccccacctttgcccctgctggtcctctggtctttctttgcttgactgacatccagctgtcactttgttaggaagtaccctctgactctgcagattggtgggggctgcttttctaccccaccccggggcagagtatttcctggcattttcccrttcagagtatttgcttaacatgtttaaagtatttccattaaccttagctacaactgataaagttttaagatatttaatattgacaccccaacctcagggtaatgacttctgaatgcatgacagcttttgggaagagctgtcacataagtggtgtatactggtttctgcacttaggggtagttcacatacttagttagcta

SEQ ID NO: 729 - DNA, 401 bp, Homo sapiens
gtcagcctgtgttggagcagcctggtgttccttcagcagagtgaggatgcaggatcagaaggtacaggtgtatctctgagtctgagcgcctccccccctgtggcaggggctccctcagctgaggcttgctgcagaaaccagaccgttgaaggggcggtgggctccccactggcctccatctgctctggggaaggaggcacrtgtagccatggacacggacctctcacggcctgggtccctcagctgaattcatcctcaccttgcatactctttggtctggggctgggagtggggtgaatgctatcatgtgccccagggctgaatgccgaagggccagcagttgagttttctacagtgtcagttttcccaagggcagttaattccaaacctcacttttatgt

SEQ ID NO: 730 - DNA, 401 bp, Homo sapiens
gctgcagaaaccagaccgttgaaggggcggtgggctccccactggcctccatctgctctggggaaggaggcacgtgtagccatggacacggacctctcacggcctgggtccctcagctgaattcatcctcaccttgcatactctttggtctggggctgggagtggggtgaatgctatcatgtgccccagggctgaatgccsaagggccagcagttgagttttctacagtgtcagttttcccaagggcagttaattccaaacctcacttttatgttaaaacaaacatgaatctattatgacatagaatgcaaagtttccatgaatcttaaagtccaaaacttggtatttcaaagaatttctgtgcttctagcagtcagcttcagggatttattctcctctgc

SEQ ID NO: 731 - DNA, 401 bp, Homo sapiens
ctccatctgctctggggaaggaggcacgtgtagccatggacacggacctctcacggcctgggtccctcagctgaattcatcctcaccttgcatactctttggtctggggctgggagtggggtgaatgctatcatgtgccccagggctgaatgccgaagggccagcagttgagttttctacagtgtcagttttcccaagggmagttaattccaaacctcacttttatgttaaaacaaacatgaatctattatgacatagaatgcaaagtttccatgaatcttaaagtccaaaacttggtatttcaaagaatttctgtgcttctagcagtcagcttcagggatttattctcctctgccatggagtggggggcttctctgtgggaaagagaaacacatcatgct

SEQ ID NO: 732 - DNA, 401 bp, Homo sapiens
aggagaaaaacatccttagcacagggtaaccttcctgttgctgttgccagacctcaaactcaaggctgcctctccgtcccagacagactgtaccttgacctctatttcatggttagaaagaagcttcataacaaagagagataacggccagtccgtgcacttgttcttcacacaggcagggcaggcccccaacatccctckctggcctactctctgcctgaaggtgggatgcatcatcccagagtggacctggagcccagagctgtcactgctccccgtgccatacagtctgtgcagacccagccaggcttttgttcctggggaagggggaagggggaagtgatctccctgttgagccttgctgaggacatccaagttgtcttttgtgacagcttcctcac

SEQ ID NO: 733 - DNA, 401 bp, Homo sapiens
tcatattctaaatatactttatacatctgtctccccagtgagtctggagttcggaggacaagggccatggcttcccccacatcccaaggccagcacatggcctgccatggagtaggtgctacatgagcgtgttgaattaaagccagtggaaggaataagggagatgggccatgaagaatgagtgctgggaaagatgtgcargaaggcattccacatggataaacagtagggcagaggcagggagtgtgctgggagaccagcccagagctctggagagcactgcacagatgcaggaggaaggccaggggtgagcaccagggcacccggagccctggcaggtttcattgaggacctagcctgacccaggctctgtactagggaagtggcctggcagtacatgg

SEQ ID NO: 734 - DNA, 401 bp, Homo sapiens
ccaaaggctgaggcttgaaccgtgaacaagggctgggggccaccacagttcactgaggacttggtacttacaagggctcagggagaccctaggcacatgctgcctccttcaattttcacagaatccctgtggctaggacctggtacccttagtctattggtgaggacactgaagtctagaagttacagaacttgcccacasctcagagctggagccacagctccaacctcagtgaatctggccccaagtccagcatgctcactgctgacagtgggcacccacagaagtgggccaggcctaagtggggtgggaggtgagtgcaggggtgattctggctctaaacagaatcacagtctaacagccatcttgtggagtaaaaggagcccatgcctcaagccaca

SEQ ID NO: 735 - DNA, 401 bp, Homo sapiens
gagccacacataggagggacatggccagtgctgggctttcataaacctggctgaaggacagggtagccttggaactgtggggatctttctgtccaccttggatccattcctttaagacccagacccacctgggctctttgctcaggcccagggcccacaggtgaggtactgttcactgctccatggcggtgatggcttttytggctcagccctgaaaacagagctggatcccttggcttacctcccaaggattccttaccccctaaaaagcccagggatgtcattaaaaacaaagtcccagttgtatagaaaacagaagaatccagcattgctgtaattcatttaaagttttatgggatggcaaatacttggggtggctgggaggaggagcgtaaagctcc

SEQ ID NO: 736 - DNA, 401 bp, Homo sapiens
cccttcctaaagagttgtgtgtgtcactgagcacctggctcacatagtggctgaggtacatgcactttgccacccctaggagttgtgggtgggacagtagatgttggggagactccagagaccccttctaggagagactttttcctggtaattggaaactgcacactaagatagcaatgggtcagcacaccttatctattrgactgcaaaaatttaaaggcctgcagcctcaggtgctggggagggtgtggggaagaggttatttcttgtactgctggtggaagcgtaaccacccactttagagaaaaatctacaagatctagtaaaactgaaactgtgtcccacaacaccacagtttctcatccagatatctatgctagaaaaaccctatgtatatatac

SEQ ID NO: 737 - DNA, 401 bp, Homo sapiens
tgtgaatgcagaaatctgcccagtatagtagtcagtgatattttagaaacagagataagatcaggttactcctttgcctaaactcctccagtgacttccgggccttgcactctactgtggggcccgagccttgacctctgtgttagtccgttttcacgctgctgataaagacatacccaagactgggtaatttattttttwaaaaaaagaggtttaatggactcacagttctgcgtggctgaggaggcttcacaatcatggtggaaggcgaaaggcacgtcttacatggcaccaggcaagagagagaatgagagccaagttaaaggggtttccccttataaaacaatcagatctagtgagactcattcactaccagtatgggggaaagcacccctacaatt

SEQ ID NO: 738 - DNA, 401 bp, Homo sapiens
aaattcacttcttcgagacctttaccccacccaggccttctctatcacatcacctggccttgttttctttatagcatatgttgtctaatatagtcatataatattaatgtagattaatattatataattatattaatatatatttgcatgcatgtaatttatatattaattttatattgatatgaattgaattaatatatmtaatttttcctatataggtaattttgttgttgctgttgtttcaagatattaagctctttggaaacagaggtcactgtatttcttcccctagaacagtgcctggcacacaataggcactctgggaatatgtgttgaatgaatgaagagagatcctgccctaggctacccacaagccagcaggcagcagatacacaatagac

SEQ ID NO: 739 - DNA, 401 bp, Homo sapiens
cttggccttgtgctttcagggtggtgcctgctctgtcccaggagactctgactgggccctgggcctccctcggctggtcctgtggtgcatcagcacctgggcccagtgctgggtgggatgggcctgccactagggtggacagaacacggtggtctcccccaaagtagtggaatcacctcctcccatggggcatccatcccyagcagctgtccacacagtgctgagtgggaatccatgcccatcgggccttgaaggcaggatggatggacagccaaaccttgccgtctcttctagaaggctagctccctggctgtgggtccaagcggatcagcagcagctgtactgggacatgactgggctttgactggcttaaagagcacggagtgctggcaaccccactg

SEQ ID NO: 740 - DNA, 401 bp, Homo sapiens
catgcccatcgggccttgaaggcaggatggatggacagccaaaccttgccgtctcttctagaaggctagctccctggctgtgggtccaagcggatcagcagcagctgtactgggacatgactgggctttgactggcttaaagagcacggagtgctggcaaccccactgtcgggggctcaggctcctagcaggaggggtctkccctgaggctttcaacaagggcctcagttcctcacaggagcctgatgaggtcccctgggtttagtgcaggtgccagcacaacatctggcccatccacggtgtcacatgtggtgggcttccatcgcccaccctccgctccaggtctccgtccacaggttttctcctctgggagaaaatccactggttttctcgtctggaat

SEQ ID NO: 741 - DNA, 401 bp, Homo sapiens
gagtgctggcaaccccactgtcgggggctcaggctcctagcaggaggggtctgccctgaggctttcaacaagggcctcagttcctcacaggagcctgatgaggtcccctgggtttagtgcaggtgccagcacaacatctggcccatccacggtgtcacatgtggtgggcttccatcgcccaccctccgctccaggtctccrtccacaggttttctcctctgggagaaaatccactggttttctcgtctggaattctctgtcactgcagccccttcccctccctttctccttgtcttaggttcttcctgggtgctccaccctggccctcttcttttcctgcccctgtacctagacctgccctcaagtgggggactgaggagcaaccccttcctctcccttcc

SEQ ID NO: 742 - DNA, 401 bp, Homo sapiens
ctgcttcgatcaaacacaatttaattaacttaccattggtaaatggctttccttgcttggctaacaaatgagccacccggaaacctactttggttgcagccttattcttattttttattgttttgcgtgtctgctatgatgaaatatactgttttaagttttctcttttttgacattgtttttctgtgagatgggaatatygtgatgtcagtgtatctcatattctgttaacacaactaataacaaacacagtactttgccatgtaatgtgataaaataataatccatacccactgcgccttaaaagtgtgacatttgaagtccacttttcttgttttcatgtgatgggtatgcaccagtaataaaataaataaataaataaaatgtgtcactgggtgagg

SEQ ID NO: 743 - DNA, 401 bp, Homo sapiens
ttaagttttctcttttttgacattgtttttctgtgagatgggaatatcgtgatgtcagtgtatctcatattctgttaacacaactaataacaaacacagtactttgccatgtaatgtgataaaataataatccatacccactgcgccttaaaagtgtgacatttgaagtccacttttcttgttttcatgtgatgggtatgyaccagtaataaaataaataaataaataaaatgtgtcactgggtgaggtactgcaagttgtaactatgttaccaccatctgtagtttactgagcacctcatcaggtctcagactcagctactcaactctgccactgtgacacaaaggcagccatagacaatatgtaaacaaatgggcatgactgtgttcccataaaacctt

SEQ ID NO: 744 - DNA, 401 bp, Homo sapiens
gccatagacaatatgtaaacaaatgggcatgactgtgttcccataaaaccttttgttgtgaacattgaaatttaaattttatatagttttcacatgtaacaaaataatattcttttgatattctccaactcattagaaaatataaaaacccttcttaggtcacaggccatacagaaacgtatcaggaagaatttgaccctytggctatagttttccaacccctaatataaatggttaatagggctcttgaaatagaatgagcaccctgcgaggaaaatgctaataattatctgcagctgaaagcattaaaccctctcagcagtccttaggaattgggctttttcttgggtgcccactgtctctgtgctaacactgggatgcatatactactttatgtgctg

SEQ ID NO: 745 - DNA, 401 bp, Homo sapiens
gtaacagtgaatgaaaaagacaaaatctctgcccacatggaacttagattgtagttgtatttgtggccacagagaaaaaaccctaatagattttagaaagtaaaatcatgaaccactaaaatgagaaacaaagcagttatatatagatataggcagatatggagagatacaaagtgtgcatgcgtgtgtgtgtgtgtgtgygtgtgcgtgtgtgtgtgtgtgcgtgtgtgtgtgtgtgttcattctttcacatattctagtaaattgctcctcatttgattaaggctgtttctcatactatcatagaatgttgaatcttagtaataaaatttttctctttttcagtgttctttcaatcttttgattactttgcagagaaagctttagatttgttcaaagat

SEQ ID NO: 746 - DNA, 401 bp, Homo sapiens
gagagatacaaagtgtgcatgcgtgtgtgtgtgtgtgtgcgtgtgcgtgtgtgtgtgtgtgcgtgtgtgtgtgtgtgttcattctttcacatattctagtaaattgctcctcatttgattaaggctgtttctcatactatcatagaatgttgaatcttagtaataaaatttttctctttttcagtgttctttcaatctttygattactttgcagagaaagctttagatttgttcaaagatgtctttaacagtcctctattacattctaacctgctttttaacaaatggaaaacaagaccaagattccagagccttctagtagcaatagtatgtaactaggattattctttgggggtttttttgcatggtatgtacttttactattagcttcctctgtttat

SEQ ID NO: 747 - DNA, 401 bp, Homo sapiens
aaaacagaggttcccctgaaacagaggttgagaagctctttccccagggagatgatcaaatggctgccctggtattctggtcccagcccaaatcctcagcgtttcttctgacttccagtatcaggctgtgatagctaagtgtcttgcttggctgctggagtgcttgttcaccttcctttgaaaattgcttttttgcccatrtagagacacagggtcaggacagcttgatgtgctggaaagagccagttctggaaactgatggactgagctgggcacaagctcgatgtggccgtgggcaagtcactctcccccagaacctgtttcttctttaagagctggtcaggcgttgatgagacctgggctacttcagggcctctgctcttcccaccacaccagaccat

SEQ ID NO: 748 - DNA, 401 bp, Homo sapiens
tctcctcctcccttccaaataacctggtgggggctggggtccctgaacttggggattgtcttctgcaatgacttggggtttcccacaactgggactagcagggatggggctgcccagtgcccctgggccggacttctaggcccatttgtgtccagtcagtcatgacatggctctggtgagcccaaaggatggagaaagtcrtctgggctcatttgctgcttcggcacctcccggcagacagggcccagcccttcctgcagcaggaaaagcaccagcctctggatccagacagtctgagttggaatggggcattgccacactcactagctgcgtgactttgagcaaatcatttcattttactgagccccctgttcccgacagggctttcctaaagattaaat

SEQ ID NO: 749 - DNA, 401 bp, Homo sapiens
gcctggatgtggagtgaagatctggtctgagcagggtcaagattggagtctgagttcccactgcaccatttaccatctgagggggccttgggcccgcaccttggtttctctgtggaggcgggaataagattgagcctacaggcagtttggagaagagcaggtgagggagaccgctgggggcctggcatactgtcctggcaygtggtaaggtttccagggatgtgagttgtcaccctcctttgcccagcacagacccccaggctcagcaccacctgctgagtttgtgctggggcctctccgtgggctgggtcagagggtgtgtgtttgctgctggagagcccttggattttgtcagtgaactcatccttcaatcacttgtgcatttattcagcctacactgc

SEQ ID NO: 750 - DNA, 401 bp, Homo sapiens
gcctcctctcccattctgggctgagctgaggagaggccagcagccgacttaattcaggctggtatctgttctccctggggtagatttctcgcaccctcagaaggcccacccgagccccacttcacgcatcaaaactcttcgacgccccccagacttcccagatctttcttggcatcacgacttttgcgagcctggactcaygcacctttgtgtcttgccacacagcaccttcatttctgaactttgaagaaggtgtatacttatctttcctaaatagtcagaactattgagaactgccaggacatgtggatatttttatgaaagcaaaactcaagcatatgctgggcagatgggtctgaccagaagggacagaacactgcctctgtcctcaggagccacct

SEQ ID NO: 751 - DNA, 401 bp, Homo sapiens
acctggaagctcaagtaaggtgcagccattagggtgccaggagaaggaggcctagtggcccagccagcccctggggttgccctgtccagagcctacacccaccaggtcctcactctgaactggcagtggcagaaccacgacttgagaaaaaaagtcctttctctgagctctgttcctctttccattgctcccgctcttagmgtcttcctttttttaatatccaatttggtcgccttccttggggacagccacagaaggggtccagccctgttggcagcctcttgcccccgcctccactaactcgcctccagcactacctcctctagctgcctgcatgccaagtccccctccagtgcttcctgacaccccttctcggacccctcaatttatctacagtccat

SEQ ID NO: 752 - DNA, 401 bp, Homo sapiens
ggatgacctcctgtgtcctgttatgcccgcccatccccaaccaaaatgcctgccagagtggtgggcggcctggcttgtcttcctcctctgcagggctgtgatgtcctcgggtgagtgtcagcacccttgctgctccagatgtctgcgctccctccttagctgggttaagatgcctcgctgcagcacctctgcctgcctgcytccctccagcctccatccccatggctccggccacaggacaccgcaggctgcctcggcccagggcacaccggctcccttgcctggaactcctgccctacagactgcccttcaggtggtggccccagctgactacctcttgtggctcctgggtcccagcaccacatgaggcacagggacagtccaggcagttcctcaggctc

SEQ ID NO: 753 - DNA, 401 bp, Homo sapiens
gagaccatttcgtttcttgccttttggaattaatgagcacagcaccagccactgctttagagggcaaggaactgtggtttggagaatgccatggctgacccaggccagggagtctgtgcattcatttaatcaagaatgctagcgagcacctactctatgcaggcatgcaccgggggcggggctgcagaggtgagggaatcrcgcaggcccagtgtgggcgttctggtgggagacaggcgatgccaacacatccatgtgtcgtatgacaggtggtgccagctgctcgggagaggggagtgtcaagagggtgttttgctcctttagatagtgatcagcaaagggcccagggtgggatgacatctgaacagggacttgtgagggatgaggacactgggagggaa

SEQ ID NO: 754 - DNA, 401 bp, Homo sapiens
ctccccagaggcagaagagccccacacctgggttggggtggcctcccagttgaccaccaaaggtgtttccaacctcgaggttctgggccctggctggtgaccaagtggggaagcccatctggggaaggcagggaggacatggccacgactgtcgtggtggtgccctccaggcctgctcagggtgtggtggagtccaggcayggcaggagtgagtgatagagcaagcgctttgaagcaagccaatgctcccagttccctgaccctcaccgatgggctcttctctctcagcacatttttaaagtttggttcctggcacccgttcctatcaggtgctctctcattcctttgcacatttctctacacatatatgtgggtcttgcaccccctggactgtggactcc

SEQ ID NO: 755 - DNA, 401 bp, Homo sapiens
cagccctcatgcccagtgctagcctctgttgtctctgagccagggcatgcgggacccagagtgggagttaggcagaagagacccgcaccagccccccgtgagggcagcagacattgcagatgcaggttctggagccagccgcctaggttcaaagccaggccccctatgtcctggctgtgggaactgacgcaagtcattcaygccatgtcagctggttgttcctcaccggggagcagggttccacatgtgggccctgcccaccaggcatgcagtcttgcacagacggggcctgcccagggaggcagggtcattgtccccttgtaataggcgaggggacccagggtacctcagctcacccgtgacagaacctgccatccacctgtattctggacaggatctac

SEQ ID NO: 756 - DNA, 401 bp, Homo sapiens
ttctttcattggaaggggcaggctggggtgagtcctagccccacaggggagcagaggacagcctgagagcatatggctgtgtggtcagaagggcatcctggcccggcctctgcacccttggttgaagcaagcccttccttccccttggccagccattgggtttgggcacaaaggaaggagagagggaaagggccactaacygagcactctgtgtgccaggacttctgcatgcagcgttggtctccacggccatgagcgaggggagtgtcctccctgtgctgctggcagcatggggccttatgtccctagagcatctatgaccccgggcaggcctgtccccctcattagacacgtccccagcatcctcacagcatcaggaggtcaggcgcctgttatccctg

SEQ ID NO: 757 - DNA, 401 bp, Homo sapiens
agaatctctggcaacagcactaaggacagaccagtgggagagggtcctggccactcatgtgcaggagccccgtgtccgggccctggggcagggacctgcccctgccgggcctgcagggacacctagagcaggagcctccaaggagcctgtggcaaaccaccttctgagctgtcccgagaggctgggcaggcgccccactcrcagctgtgtgagccccagcctgagcttctggcctgcacagcaaggaaggtaacctttggggcagggctggctgcactaggaatgcacctcacggaggcctcacagccactccacagggtgggggatcccattccagaggggtaggctgagactccgctgatgagggatgggggctatccctgcagcagccccttcaggag

SEQ ID NO: 758 - DNA, 401 bp, Homo sapiens
gtagacaccaggcagatgggcagtcggcactcagcacgtggccttgtcaccgccttcccgcgtactctgaccccaagtcagaatggggagcctggcacacagggcaccgtgtggacatggtgagctgtggtcaccctggagccaggccctcgtaccgcaccacgcatggcacacgccttcatctgccctcagcgcctctcscataccctaggaattgtcactcaaattccctttgcctgtggatccgtgacagcaatatctatggctggtccccgtcatctggccttgggtccagcattcctcctcctcctcctcctcctcccttggagcatgctgaagcagccctgtccccacacagtgactgcggtgctgtttccttcgccacccttctgctgtctgga

SEQ ID NO: 759 - DNA, 401 bp, Homo sapiens
tggtggcacgagcctgtggtccccactactcaggaggctgaggtgggaggatcacttgagcccaggaggcagaggttgtagtgagccaggattacaccactgcactccagcctaggcaacagagtgagaccctgtcacacacacacacacaacacacacacaaatatatatatatacacatatatatacatatatatacayacatatatatatattacactataaatatacacagtttgtcatttgtcaatttaaaaatgaaaaagacaagctccagagaaagggcagttgcagcagcatgtttaaggatgagtgggacttctattgcctagaatgggaagggtgttccaggcagagggaacaacacgtgacaggcttgtatgtgcaatgaggagcccagg

SEQ ID NO: 760 - DNA, 401 bp, Homo sapiens
ctgcggtgccagggcacaagaggacatgcagggccagggaaggtgggcattgcttgagatgcccatgggccatgggtgccaggcccagggaagagggtggtggggtggagcctcaggcaggcttccgaaggaagtgagcagggcgcttctgggtggaagttgtgtaatgggtgtggcatgagatgaggcaacccgcctcakatgcagagcgatgatagggtggaagatagccaatagtcagcagcgcctcactgccccagtgctcaccgtggggggatccactcccgcactggccaggcctccccaggtctccctgccaccttgccctgctctgtctccaggcctttgctggtgatgctgccctcgccgccggggcccatgctccactcaagcccgcttct

SEQ ID NO: 761 - DNA, 401 bp, Homo sapiens
ccagttcacacagctatctccttctgaaacctgggggacgttctgggcaagtagggggcagggctgcccctgcaacaccaggaaggtgaccctcatgtggcccagctcagctgacccggaagactcagagccccagatctgcagcgagagctgggcactggagtgggggatagggttgcccatgcctctcaaggttgtcasagagcctgaggccctggctgggaacacagaagccaccacagcttgaatccccggcaagagatctgtgtgtgacccagccccagctcgcacagaagcctgctgtgcacagaggacagtgctccaggcatgggaagtgctcacaacagcggctgccacccgcaagttcttcattcattcatcggctcattcattccgtcaat

SEQ ID NO: 762 - DNA, 401 bp, Homo sapiens
cagttctggtaggaagttgcttagagtcctgcagcgagggcgtgctgtcctagaaggagctcctggaatgctgctgggccctgcagagcctgggacatccagtgaccctgtgacagcaagcagctggctgtgatcagatccactgagtcctgaggtggctggatggctggcacagtggccacccattgtgtgacagaaggyggaggcgctcaggtccagacctgagcaggtctgcggaggaggcccagactccctgtcacccatctctgttgcgctgacacctattcctgggctcacctatggcttcatgggagggtcccctaaggccacctgatagaattaaaaatgaaggcctggcccacagacgggtctgcaaccaaatatggacccccatgctgttc

SEQ ID NO: 763 - DNA, 401 bp, Homo sapiens
gatggcggcgatggtggtggtggtggtgctagaggtggtggggatggtgatgatggaggtggtggtgtttatggtgacggtggtggtggtgaaggtgatagtcatggtggttgtgttggtcatggtggtgatggaggtggtgatggtgacagtggtggtgattgtgacggaggtggtggtgatggtggtggtggtgatggwggtggtgatggtgatagtgatgggtatggtggtggcgatggtggtggttgtaataatgatggaggtggtgttcatggtgatgatggtgatggtgggagtcatggttatggtgatggtggtggtagtggtggtgctggtagtgcttgtgctagtggtaaagctgatgttcatggtaagggtaatgattttgccgacaccaa

SEQ ID NO: 764 - DNA, 401 bp, Homo sapiens
cctcccaggttcaagcaattcttgtgcctcaacctcccgagtagctgggattacagacttgtgccaccatgcctggctaattttcgaattttttgtagagatggggtttcaccatgttggccaggctggtctcaaactcccgacctcaggtgatccacccgcctcagcctcccaaagcactgggattatagatgtgagccmccgcgcccggacacatctgctttttcagtgagctcccaggtgatgtagatgatgctgtttcccggaccttaggtgtcagaatcaagggcctagaagtctgcttttcagatgtgtagaatctgggacacgcactttgaatccttagctgcatttttcccagaccccttggtgattgactacccattaggatttgggagcct

SEQ ID NO: 765 - DNA, 401 bp, Homo sapiens
catgtgagttcagtgggcccattgtgcagacagcttggcagggaccgtgcagagtcactgttcccgggaatgcagcagctgagctctctgccctggagttccggaggctcctttcactcaagacagccctgtgacggtgatctgttgcacagatgaccctccacctgatgctttggagctggagacagatttctcttgggrgcttgctaggaccggggtggggtttggggcatttggagttgggtgtgaggctgtggagccttgcagctgatggcttggagtcacactgcaggcagctgggttcgggccccaccctgcactagctgcatgacctggggcaggtacttcacctccttcctcaggctcttcatttttcaaatacctgcctcgttgactttggg

SEQ ID NO: 766 - DNA, 401 bp, Homo sapiens
ccacgtgtgcgtgtggtcagctgtagcttccggctgtctcacttctgctgaattccagcaatttctcatttcctttaggaaacaggatgagtctggagaggagtatgaaaaatcatgacaaacctggcgatagggacactgggaacctagccctgaatgaagcttatagttggtcatgattgccagggtcttgaacagtgyggaccaggggaaagaaggtacctggggccagatgccctggattcaaatcccaccacccccactaacacttgtgaccttgagaaagttgcgtaacctctctgtgcctcagtttgctcatttgtaaaatgatgatagtacctgcctcgtaggatttaaggattaaattagatactgttttttaagtgtttgaaactgcctct

SEQ ID NO: 767 - DNA, 401 bp, Homo sapiens
ggaaaaaaaagactggaaggaaatgaaccaatgtcttaacagtggttgccctttggtggggagagaatgagtaactctataatcttctttgtacatttatgttccaagttttttatatatatatatatgttatatatatatatataacatatatataacatatatataacatatataacatataacacacatataacacayatataacatatataacacacatatatataacacatcaatcatatacacatatatatcacacacatatatcacacatatatcacacatatatatatatcacatatatatcacatatatatatactactttcataaacaggaaaaatgttaaaaagttaaggaatcatgtgagcttggcttctggggaggttgggtggagtt

SEQ ID NO: 768 - DNA, 401 bp, Homo sapiens
ttacttcagaataaagctctctgcttaatgtttgagtgtccagagacgtttgcaccccacccttccttaaggtgtacttgaggcctattaaatttctacctagaaagttcttgatatcaaagatgatccctcaaactccattcttccgcctgcccagacttgttctagatatttatcttctctcccacctttctcttgagrtgaaagaactctaattcttttgtggttcttctgatcttgcaaaagaaccacattttttaaaacttaaaaaaaaaattctgagacagggtcttgccctgttgcccaggctggagtgcagtgggaacaatcatagctcacttcagcctcagcctcttagctcaggtgatcctcttgcctcagcctcccaaatagctatgacc

SEQ ID NO: 769 - DNA, 401 bp, Homo sapiens
atttccttcctttatgaggctaaataatattccaattcatatttaaggctaaataataatgatatgtatatatcacattttgtggccaggtgcggtggctcacacctgtaatcccagcactttgggagtctgaggcgggcggatcacaaggtcaacagattgagaccatcctggccaacatggtgaaaccctgtcggtackaaaaatacaaaaattagctgggagtggtggcgtgcgcctgtaatcccaggaggcaggagaatcgcttgaacctgggaggcggaggttgcagtgagctgagatcacgccactgcactccagcctggtgacagagcgagactccatctcaaaaaaaaaaaaaaaaaaaaaaaaaaatttatatgtatatatatatatctcac

SEQ ID NO: 770 - DNA, 401 bp, Homo sapiens
cgtgcctactataacatcttcataggacctctaagctggaatcatttaagcaggatgccaaaggacagcaattgggccacacttcttgactgtagtgacactaaaacctcattgcaactctctacaggaaggccagctcttcagtgtggccccccagaccctgcttgctctggcccctgcctgccacccgcccccactccygcctcatcctgcagatccctgtgcactgcgctccagctgctgggcctgccttccttgaatgcaccatgtcttcgccttgctcctgggctgctttcttggttctcccaccgtgctgcccactacccctgcccttctggcctggctgatgccgactcctccttcagatgtctccttcaacacactcccagggggttgctccg

SEQ ID NO: 771 - DNA, 401 bp, Homo sapiens
cacctctcagaagggcaagagcacaaggcgtgcgcacatgctgtgggcagtggtgcggggggcatccaggcttctccggagctagtgggagggaaagcagaactgtcgctttggaggggactctggccattcctgtgagtatgaccgggcacacacccacctttcaccccggcagctccacttctaggaagcttcacctayacatgttcccaagtgtgagaagtgatctttgtccaaggttattcattacagcagtgtttgtcagagcagaaaaggggaaatggcttgtgtgtgccttaataaggcactagaggaatcagtcgggtttgtctgtgcagcggaataccatgcggccgggaaggtagagtaaggccctgataagaggggccttccgtgtctgt

SEQ ID NO: 772 - DNA, 401 bp, Homo sapiens
aggctaccttttaagctgttaaaattctccctttacccccattccttttcctttcttttttttccccttagagacagaagtacaatgatgggatcatagctcgctgcagccttgaactcctgggcccaagaaatcctcctgcctcagcctcttgagtagctgtgactacaggtgcatgccaccaggcctagctaatttttwaaaattttttggtagagacagggtctccctatgttgcccaggctggtctcgaactcctggcctcaagcaatctccccagctcagcctctcaaagtgctgagattacaggcatgagccaccatgcctggccacattcctttttcaaagccaccttgagagctaggaatactagctgggtctcttctgctgggtcctgcctg

SEQ ID NO: 773 - DNA, 401 bp, Homo sapiens
tggttttgagaggagtcttgctctgtcacccaggctggagtacaatggcatgatctcggctcactgcaacctccgcctcccgggttcaagtgattctcctgcctcagtctcctgagtagctgggattacaggtgcctgccaccatgcccggctaatagagacggggtttcaccacgttggtcaggctggtctcgaactccygaccttgtgatctacccgccttggcctcccgaagtgctaggattacagggatgagccaccgcgcccagccctattctgggctattattccatggagaataggtagagagagaaggaaatttccagtgtggaggcactctcctctggagggacccctcacttaggctgtgtgcttaatcttatcagagtccaatttgccca

SEQ ID NO: 774 - DNA, 401 bp, Homo sapiens
gagctatgattgtgccactgcactccagcctgggtgacagagtgagaccctatctttaagaagaaaaactgtaatcccagcactttgggaggtcgaggcaggcagatcacgaagtcaggagattgagaccatcctggctaacatggtgaaaccccgtctctactaaaaatacacagacacacacaaaaaaatcgggcgtgrtggcaggtgcctctagtcccagctactcgggaggctgaggcaggagaattgcctgaacctgggaggcggagcctgcagtgagccgagatggtgccactgcactccagcctgggtgacagagcgagactccatctcaagaaaaaaataaataaataaaaaagaaaaaacaaaacacaacagaaaacagtgcctggcatgta

SEQ ID NO: 775 - DNA, 401 bp, Homo sapiens
catctctactaaaaatacaaaaattagccaggcatggtggtgcatacctgtaatcccagctactggggaggctgaggcaggagaatcgcttgaacctgggaggcggaggttgcagtgagctgagatcacaccactgcactccagcctgggcgacagagcgagacttcatctcaaaataaataaatagttagatggaaagaragagaaagaaagaaatagagaaaaagcgagagaaagaaagaaaaaagcagatccacagtcccaggtggaatgtgatccaagctgatgtcttgttatcactgcagaaatatcgatgtgatagtctaccactgttcgctcagaaccttctagggttgcctttctaaaatctgaattattcagaattccgaaacacatcaggc

SEQ ID NO: 776 - DNA, 401 bp, Homo sapiens
acaaaaattagccaggcatggtggtgcatacctgtaatcccagctactggggaggctgaggcaggagaatcgcttgaacctgggaggcggaggttgcagtgagctgagatcacaccactgcactccagcctgggcgacagagcgagacttcatctcaaaataaataaatagttagatggaaagaaagagaaagaaagaaawagagaaaaagcgagagaaagaaagaaaaaagcagatccacagtcccaggtggaatgtgatccaagctgatgtcttgttatcactgcagaaatatcgatgtgatagtctaccactgttcgctcagaaccttctagggttgcctttctaaaatctgaattattcagaattccgaaacacatcaggcccaagaggtttaggaa

SEQ ID NO: 777 - DNA, 401 bp, Homo sapiens
ccaggcatggtggtgcatacctgtaatcccagctactggggaggctgaggcaggagaatcgcttgaacctgggaggcggaggttgcagtgagctgagatcacaccactgcactccagcctgggcgacagagcgagacttcatctcaaaataaataaatagttagatggaaagaaagagaaagaaagaaatagagaaaaagmgagagaaagaaagaaaaaagcagatccacagtcccaggtggaatgtgatccaagctgatgtcttgttatcactgcagaaatatcgatgtgatagtctaccactgttcgctcagaaccttctagggttgcctttctaaaatctgaattattcagaattccgaaacacatcaggcccaagaggtttaggaagggatcatgcc

SEQ ID NO: 778 - DNA, 401 bp, Homo sapiens
atagtaaatgctgtgtcaatgttaaccatttactgttgctactattactagttaaagtgcttacctcaccatccgtaatcatcatcatggaaaagcgagtgataatcacagtgagataccgtgacacacctgcttcagtggctacgataaaaagagggcacggaggagctgaggtcagagagttccacaggaggtctgctrgggactggggccttttccttacatggatagggggagggttctgagcagaggaaggacatgatctgacccatagattaatagagtccctctggctgtgtgtggcagcaggagccagagccaggaaattggggcagaagctcctgctgtggtccatggtcctgcctgtgggggtgtgaaggaggggtgagcccatttatatc

SEQ ID NO: 779 - DNA, 401 bp, Homo sapiens
ccagggtcggggtttgcagggagtggcagaaggccttgtgaagaatcagagacgtggctgagtctgttcggtgctgggtgcccgtcagacagctgcgtgagatggcaaggagacagttggatacgcatacctgaagttgagagaggtccaggggggagaaggaaaagtaggggtccccagcacagaggtgttgaaatcacsaggagagccgtgtggatggggaagagcgaagctgtgcggagagacggcgaggaatcagcgaaggaggctggggagggagtgccagtgaggagggaggagacctggagagtatggacccctgcagtgaggcaggaggttgatgagggcccgaggtgattgctagatgggaggcacaaaaggctgaagggagcaggttcaag

SEQ ID NO: 780 - DNA, 401 bp, Homo sapiens
aaaagtagccagtgtggtgatgcgtgcctgtaatcccagctactcgggaggctgaggcacaagaatcacttgaacccgggaggcggaaggttgcagtgagctgagatcatgccactgcactccagcctgggtgacagagtgagactctgtctcaaaaaaaaaaaaagataccaaataatcactcagccacgtaatttaacygtggcaatgaaactataaagaaaaggtacacagccactcgagaggctaaggtgggaggatcgcttgagcccggggggtcgaggctgcagtgagccatgatcacgccactgcactccagcctgggtgacagagcaagaccttgtctcaggaaaaaaagaaagaaaaagtgcagggggccttgagagagaataacaggcagg

SEQ ID NO: 781 - DNA, 401 bp, Homo sapiens
tctgaagaagcaacctgtgaagctcgacggggaggatgaacaggaactagcctggggtgggctggaggctggggcattttggctgggagaatagtctgtgtgcaggtccaaggtgtcgcaggtggggaggaactgggtgtgttggaggagcagagtgcgggaaggaaaacttgggtcagctggtctggtgagccacggtasgagatttggactttcttcccacagcccctgggagccacagaagggttttcaggggagaagtgatacaacttcatttaattctttctaaacttctgtgtgcactttcaagccttgatgtcctgacactcttcctcccccaggacagtttgtaccgctccagggtcacgtcagagactccagagccgcctccaccactgtga

SEQ ID NO: 782 - DNA, 401 bp, Homo sapiens
tgagtggccagatgacagcacaaagcttcaaggtcgggggccgtggggtggtggtggagtctttgacctcatgccgatcaacgtgcttctctcggttccctgttctgggccctgccctggaaagaggcagggtggccggggaggggagtttccagattacctgtgtctcctgggcatggcacaggaaatgactccttcatrggctgagagttttgggaggccctgtgccacaaccccccagcaagagcccacatgaatccgccatctcgcccgcagcctggggatgctgctggattttccgggtgtggaggggcccaggtcccccgagcagctcctctgaccccgcaacccggcatctcctgtgcccgagtggcgtctgtcagttgctcagtaagtggagg

SEQ ID NO: 783 - DNA, 401 bp, Homo sapiens
gatgtgagggaaacagtgacccactgcagagggtttcctgagctctcgtgcacagagaatcgtgcgtgtgcctctgggtgggcaggggacatgcagcctgggtgaacatttcccatacactaggatgaattggcccttcctgttcatgcctctaatgccccatttccctcctacagagattttctcttgtttaacaattaraagatagcaggctgctttgtggttctcagtcaggatgctttttagttgcaagtaacaaccctggcaccatctggccaatggttaagacatgtgatgtgttctagaagcccaggggtggatgggcaccaggtggataggatcagcagctcaagcatgtctgtcagggactcaggttctcagcctccaaaggcctctgtatg

SEQ ID NO: 784 - DNA, 401 bp, Homo sapiens
agatcatgaggtcaagagaccatcctggctaacacggtgaaaccccgtgtctactaaaaatacaaaaattagctgggtgtggtagtgcacacctgtagtcccagctatcgtgaggctgaggcaggagaatcgcttgaacccaggaggtggaggttgcagtgagctgagattgcgccactgcactccagcctgggcgacagrgcgagaccccatctcaaaaaaaaagcggggggtggacagggggcaagtggagtctggctgccaaagactacttgtctgatggtggggaaaaaaaatgggtgtctcctcccttgtcactgggaaggtttttgtttctctttccatcttcatcctctataggtcctttcattccttcccccagtctgaaatatttccggtgt

SEQ ID NO: 785 - DNA, 401 bp, Homo sapiens
gcaaggatgtgtgcacagctacagacacaccggaaatatttcagactgggggaaggaatgaaaggacctatagaggatgaagatggaaagagaaacaaaaaccttcccagtgacaagggaggagacacccattttttttccccaccatcagacaagtagtctttggcagccagactccacttgccccctgtccaccccccsctttttttttgagatggggtctcgccctgtcgcccaggctggagtgcagtggcgcaatctcagctcactgcaacctccacctcctgggttcaagcgattctcctgcctcagcctcacgatagctgggactacaggtgtgcactaccacacccagctaatttttgtatttttagtagacacggggtttcaccgtgttagcc

SEQ ID NO: 786 - DNA, 401 bp, Homo sapiens
gcatggtttgaagtggggtggagctaggggcaacctggatgcccaacaccaggggaccagacacgtgagccgtggcagatgtacagcatgtacaactgttcagctgccagacgccatacactggacacacatccagcaacgtggctagatggcgaacacatgctatttggtgaaaaccagaagaaaccgaaagaatgagayacagagctccaaaccccggaagctgactctttactcaaacctcaatatatattttgcaaggatgtgtgcacagctacagacacaccggaaatatttcagactgggggaaggaatgaaaggacctatagaggatgaagatggaaagagaaacaaaaaccttcccagtgacaagggaggagacacccattttttttccccac

SEQ ID NO: 787 - DNA, 401 bp, Homo sapiens
ttgccttaggaacccatggggcttacccccaggagtcagttgcagccggagataggcattctctctccccaggggtgggattaaggcacctgccacaacacccagctaatttttgtacttttggtagaactggggttttgctccattggccaggctgatcttgaactcctgagctctctatgaggctgctctgacccgcgytcccccgagagcacaggagggtcccgcttccccatacctctcgccactttgctgttgtcctgcttcccagtttcaccaatccgaagggtgtcaagtggggtctccggggttttaatgctctgatggtgagtctggctgagtgcctcttcatgcccctgttaacctaattcaggctcccctttccaagagaggcccagtca

SEQ ID NO: 788 - DNA, 401 bp, Homo sapiens
taatttttaaaagtatgatgtgtgcgctgggcatggtggctcatgcttgtaatctcagcactttgggaggctggggctgatggatcacttgaggccaggagttcaagaccagcctgggcaacatggcgaaaccccatctctacaaaaaatacaaaagttagcccggtgtggtggcacacacctgtaatcccagctactccrgaggctgaggcgggagaatcacttgaacctgggaggcggaggttgcagtgagccaagatcatgccactgcactccagcgtgggtgacagagctagattctgtcttaaaaagaaaagaaaatatatgtaaagtgtttagagcagtgcctggcacatggtaaatgctatagtcatgtttgtggatatcactacatttaccag

SEQ ID NO: 789 - DNA, 401 bp, Homo sapiens
ggagttcaagaccagcctgggcaacatggcgaaaccccatctctacaaaaaatacaaaagttagcccggtgtggtggcacacacctgtaatcccagctactccagaggctgaggcgggagaatcacttgaacctgggaggcggaggttgcagtgagccaagatcatgccactgcactccagcgtgggtgacagagctagaytctgtcttaaaaagaaaagaaaatatatgtaaagtgtttagagcagtgcctggcacatggtaaatgctatagtcatgtttgtggatatcactacatttaccagagttttctcctctgggtagcacataggttttaatgtgacgtgataaatactttttcttcacagctagcatttgtctctgatgactatctctagacat

SEQ ID NO: 790 - DNA, 401 bp, Homo sapiens
ctctgggtagcacataggttttaatgtgacgtgataaatactttttcttcacagctagcatttgtctctgatgactatctctagacatgttctcacgttagcatgttaaatgtaccctctttctttttaatgactgcctgtatcatatggacatatcaaaatgtatttactgattctttaatgagagactcttgggtttcwtcttttcgtctttctcaagtagtgctgcagtggggagcctcgtccaagaagctctgggttcttgagccagtgtttttactggagccagaattgctgggtccagggatatgcatggttttgatgtaatgaactgacaagttgccctcaaagacggttctgccactagaacctggtgtatccccaccaacagaatacagacc

SEQ ID NO: 791 - DNA, 401 bp, Homo sapiens
gagccagtgtttttactggagccagaattgctgggtccagggatatgcatggttttgatgtaatgaactgacaagttgccctcaaagacggttctgccactagaacctggtgtatccccaccaacagaatacagacctgttggttttgatttgtttcttagtttggtttggtttttttgtttgtttgtttgagacagggtmtctctgtggcccaggctggagtgcagtggctcgatcttagctcattgcagactcgaactcctgaactcaagtgatcctcccacctcagcctcctgagtagctgggaccacaggcacacaccaccacacctgctaactttttaatttttttgtagagacagggtcttgctatgttgcccaggctggtcttgaactcctggt

SEQ ID NO: 792 - DNA, 401 bp, Homo sapiens
tctcgaacattgtatcatttcatttggggagctttaaactgcatgcccacagcgtgcctgtacatcgtggaagagaggaggacatttctataaaatcatcctgtggtgcttttcattttccatggtgtgtcttctcccttgattctcagatgcccctaagacatagacaaggcaggtgtatctgttgggaaaacagaatcyactctaggtattttagcggaaggaattcaatacagggaatttggttaaaaaagttggggaggagcagagaaaccaaaaaggggcagaggccagtccctagatgagcaaccagagctgaagggcgcaaggagtagggcaccttagcagagcccagggcagtgttgggcggaggcctcctccgcgtgagatgctgtccacat

SEQ ID NO: 793 - DNA, 401 bp, Homo sapiens
gttgggaaaacagaatccactctaggtattttagcggaaggaattcaatacagggaatttggttaaaaaagttggggaggagcagagaaaccaaaaaggggcagaggccagtccctagatgagcaaccagagctgaagggcgcaaggagtagggcaccttagcagagcccagggcagtgttgggcggaggcctcctccgcstgagatgctgtccacattggagggaggaccacctggcttctcaccacctctaccttccaggcttctgccactgcccctgttggctgagcctcaccagcagtcctgggaaatgtagttccctgtgtttcagagcaggctaggaaaagggcaggcaatggatcaaagagggaactcgatccccatttgatagatgagaaagc

SEQ ID NO: 794 - DNA, 401 bp, Homo sapiens
tgatagatgagaaagccagagggtctaatggcctgtcaggggcacctcatttagtgacaggcaccatccctggcactgaggtaagtcccttggttgccagggtaacctgaggcagctctttgggcattgcatgccaccagccagtcactgctgcctgggatgggcctacatggttccgagttcctcctctgccggaggagycccctccaagcttccccctcccacactcagagtggacactgccttttgttcctgcccatcgcactgggctgtgccctgaccctaaggaaagccctcctgaggacaccgtgccggagagttctgggtgctggagtattctcagggagccccctgcatgaggtaccagcatcctgggccacactagaggccagaggaatgtt

SEQ ID NO: 795 - DNA, 401 bp, Homo sapiens
tgtcaggggcacctcatttagtgacaggcaccatccctggcactgaggtaagtcccttggttgccagggtaacctgaggcagctctttgggcattgcatgccaccagccagtcactgctgcctgggatgggcctacatggttccgagttcctcctctgccggaggagtcccctccaagcttccccctcccacactcagagyggacactgccttttgttcctgcccatcgcactgggctgtgccctgaccctaaggaaagccctcctgaggacaccgtgccggagagttctgggtgctggagtattctcagggagccccctgcatgaggtaccagcatcctgggccacactagaggccagaggaatgttgtgccactgagcagcccaagctggcattgagcg

SEQ ID NO: 796 - DNA, 401 bp, Homo sapiens
cctacatggttccgagttcctcctctgccggaggagtcccctccaagcttccccctcccacactcagagtggacactgccttttgttcctgcccatcgcactgggctgtgccctgaccctaaggaaagccctcctgaggacaccgtgccggagagttctgggtgctggagtattctcagggagccccctgcatgaggtacyagcatcctgggccacactagaggccagaggaatgttgtgccactgagcagcccaagctggcattgagcgggcagctctgtactcagctggcatcaggcaagtgtgggtgggagctgtgctttgtgccctcctggagctggtggcttcacggaggtgaggggagcccaggggagatggaaggtgcccagatacacaaacag

SEQ ID NO: 797 - DNA, 401 bp, Homo sapiens
ctgtactcagctggcatcaggcaagtgtgggtgggagctgtgctttgtgccctcctggagctggtggcttcacggaggtgaggggagcccaggggagatggaaggtgcccagatacacaaacagggaagctcaacaccaatgtgagagtttaaaggagacagagaagcccagttacacaagaaagcctcggtcagaagcgmcgtgattgctaaggtgacctgggcccttcttgtaaagcagacctgtttcaagtactttacacttattcacttagttaattctcataataatcctgtgaggtaggtatggactgttaaccccagagagttaagtaccttggccaaggccacacatctagggagtggcacaccaggaatccatataatagtggtagtaatag

SEQ ID NO: 798 - DNA, 401 bp, Homo sapiens
ctgaggttgggagttcaagaccagcctgaccaacatggagaaaccccttctctactaaaaatacaaaactagccaggcgtagtggcacatgccacagggaggccactcccatgcacagcagttaggaattggttggaagtccttggaggtgattggcctgtgagttatgtctagtttgtgttgagaaagtgtcttcgaggmcaggagtggtggctcatgcctgtaatcccagcactttgggaggccaaggcaggcggatcacttgacgtcagaagtttgagactagcctgaccaacatggtgaaaccctgcctccactaaaaatacaaaaattagcggatgtggtggtgggtgccagtaatcccagctactcagcaggcagaggcaggagaatcacttgaa

SEQ ID NO: 799 - DNA, 401 bp, Homo sapiens
gttgggagttcaagaccagcctgaccaacatggagaaaccccttctctactaaaaatacaaaactagccaggcgtagtggcacatgccacagggaggccactcccatgcacagcagttaggaattggttggaagtccttggaggtgattggcctgtgagttatgtctagtttgtgttgagaaagtgtcttcgaggacaggwgtggtggctcatgcctgtaatcccagcactttgggaggccaaggcaggcggatcacttgacgtcagaagtttgagactagcctgaccaacatggtgaaaccctgcctccactaaaaatacaaaaattagcggatgtggtggtgggtgccagtaatcccagctactcagcaggcagaggcaggagaatcacttgaacctga

SEQ ID NO: 800 - DNA, 401 bp, Homo sapiens
aactagccaggcgtagtggcacatgccacagggaggccactcccatgcacagcagttaggaattggttggaagtccttggaggtgattggcctgtgagttatgtctagtttgtgttgagaaagtgtcttcgaggacaggagtggtggctcatgcctgtaatcccagcactttgggaggccaaggcaggcggatcacttgasgtcagaagtttgagactagcctgaccaacatggtgaaaccctgcctccactaaaaatacaaaaattagcggatgtggtggtgggtgccagtaatcccagctactcagcaggcagaggcaggagaatcacttgaacctgatctcagcagtgagccgagatcgcgccaccgcactccagcatgggcgacagagcaactccat

SEQ ID NO: 801 - DNA, 401 bp, Homo sapiens
cacagggaggccactcccatgcacagcagttaggaattggttggaagtccttggaggtgattggcctgtgagttatgtctagtttgtgttgagaaagtgtcttcgaggacaggagtggtggctcatgcctgtaatcccagcactttgggaggccaaggcaggcggatcacttgacgtcagaagtttgagactagcctgacmaacatggtgaaaccctgcctccactaaaaatacaaaaattagcggatgtggtggtgggtgccagtaatcccagctactcagcaggcagaggcaggagaatcacttgaacctgatctcagcagtgagccgagatcgcgccaccgcactccagcatgggcgacagagcaactccatctcaaaaaaaaaggaaattgtctttg

SEQ ID NO: 802 - DNA, 401 bp, Homo sapiens
aagtccttggaggtgattggcctgtgagttatgtctagtttgtgttgagaaagtgtcttcgaggacaggagtggtggctcatgcctgtaatcccagcactttgggaggccaaggcaggcggatcacttgacgtcagaagtttgagactagcctgaccaacatggtgaaaccctgcctccactaaaaatacaaaaattagcrgatgtggtggtgggtgccagtaatcccagctactcagcaggcagaggcaggagaatcacttgaacctgatctcagcagtgagccgagatcgcgccaccgcactccagcatgggcgacagagcaactccatctcaaaaaaaaaggaaattgtctttgaatccaagtttaggggaaaaaaaaatcatctggagttggtacac

SEQ ID NO: 803 - DNA, 401 bp, Homo sapiens
gaagtttgagactagcctgaccaacatggtgaaaccctgcctccactaaaaatacaaaaattagcggatgtggtggtgggtgccagtaatcccagctactcagcaggcagaggcaggagaatcacttgaacctgatctcagcagtgagccgagatcgcgccaccgcactccagcatgggcgacagagcaactccatctcamaaaaaaaggaaattgtctttgaatccaagtttaggggaaaaaaaaatcatctggagttggtacactctcttggtcacaaggagaggcctttggaagaggagctccacagcttcagtgatggtgataagagaaccttttgtttggcactaactggacagcatgccctcccacacagccgtgaagccactgttgtcgtcccc

SEQ ID NO: 804 - DNA, 401 bp, Homo sapiens
tgataagagaaccttttgtttggcactaactggacagcatgccctcccacacagccgtgaagccactgttgtcgtccccactttccaggggcatcacacgaccttcctggcctgtggtcgctgctcaggccatggggatggctgcgcttctgccatgagtccttggtgatagcaggtgaacggtgaagagtccatgttccsgggagcccctgctgctggtggaggaatggacaagtaaacgactgaatagagaagcacgttggaaccaagacttctccaaagccagtgcttgtaactgattcggggtgctgctgtggcgtggttaggcatagaggctcacattctagccttgtcgcttcctaactctgtgactttggtctggtgacctcccctgctggcct

SEQ ID NO: 805 - DNA, 401 bp, Homo sapiens
ctccttctgactcctcatcttgctgtccccagcatgtcactctcagcctcatgctcccaagatgacggttgcaccccctgatatgacatttatattccaagtacaagagaagggtagaagaggtgtgccccatttatttattaggaaaacaatagcttcgccaaaaggtcccatcccccatcccctgcaaacttcctcttmcctcacactggccataatcagatacatccttagtttagctgcgtgggaatccaggaaagtaagctttttggattagtatcctgccaccccaacaaatgtggacctctctcaaggaatcagaagaggatgggtttggatttgacaaccagcagtggagcctgaggtgcctggccctggagtaacccagagcaggagtgcgg

SEQ ID NO: 806 - DNA, 401 bp, Homo sapiens
ttctgactcctcatcttgctgtccccagcatgtcactctcagcctcatgctcccaagatgacggttgcaccccctgatatgacatttatattccaagtacaagagaagggtagaagaggtgtgccccatttatttattaggaaaacaatagcttcgccaaaaggtcccatcccccatcccctgcaaacttcctcttccctsacactggccataatcagatacatccttagtttagctgcgtgggaatccaggaaagtaagctttttggattagtatcctgccaccccaacaaatgtggacctctctcaaggaatcagaagaggatgggtttggatttgacaaccagcagtggagcctgaggtgcctggccctggagtaacccagagcaggagtgcgggatt

SEQ ID NO: 807 - DNA, 401 bp, Homo sapiens
agtgagactgtctcaaaaaaaaaaaaaaaaaaaaaaagaagaatgcgtaagaaagtgggagcagtggttgcttctggtagttgaaactggaggatgggattgggagacagggatgcgtgttatatcattttaatccttaaaaaaaattcaagggccagacgcagtggctcacacctataatcccagcactttgggaggccragggaggcggatcacctgagatcaggagttcaagaccagcctagacaacatggtgaaacccggtgtctactaaaaatacaaaatgtagccgggcatggtggcaggcgcctgtaatcccagctactcaagaggctgaggcaggagaatcacttgaacccgggaggtggagattgcagtgagccaagactgcgtcactacac

SEQ ID NO: 808 - DNA, 401 bp, Homo sapiens
ggatctgcatttgactgagctgcctgtgatgatgctgatacacaataacatttgagaaggcctgcttcatttattgattaaaaaaatttttttttgagacggagtcttgctgtgtcacccttgttggtgtgtagtgacgcagtcttggctcactgcaatctccacctcccgggttcaagtgattctcctgcctcagcctcytgagtagctgggattacaggcgcctgccaccatgcccggctacattttgtatttttagtagacaccgggtttcaccatgttgtctaggctggtcttgaactcctgatctcaggtgatccgcctccctcggcctcccaaagtgctgggattataggtgtgagccactgcgtctggcccttgaattttttttaaggattaaa

SEQ ID NO: 809 - DNA, 401 bp, Homo sapiens
ggaatcacagaaaactctgccccatacccactgggtccagctttggcctctgaaggaaatgcaactgctaacagccacttctcccctctcctgcccgctacaattcagaggaagccttccctaagtggcccttgggatgttcagatgtacctttcagaagtttcctgcccaggcccagtgcggtggctcacgcctgtaacyccagcactttgggaggcggaggcaggcggatcacctgaggtcaggagttcaagaccagcctggccaacatggtgaaaccctgtctctactaaaagtacaaaaaataactggctgagcatggtggcaggtgcctgtaatcccagctactcaggaggttgaggtaggataatagcttgaacccaggaggcagacactgcagt

SEQ ID NO: 810 - DNA, 401 bp, Homo sapiens
ggcagacactgcagtgggctgagatcatgccacctgcactccagcctgggcaacaagagtgagaccctgtatcaaaaaaaaaaaaaaaaaaaaagtttcctgcccagatggggatgctgaggcgcagaagaggtggggctggggggccatgcagtatcagggcagcaacagtaataatcgtaacagcaaataaagactcaytggttcagctcctcctgagtcaggacctgtactgagctttaacaagctacacacatcactgaatcatacagaccacacttgggaagcaggcacccaaatgtcagcaatgagctgagacgggaagccctcaaccttcatggcagggagaagtaggattcgaacccagatctggttgggtgtggtggctcaagcctgtaatc

SEQ ID NO: 811 - DNA, 401 bp, Homo sapiens
ggtggggctggggggccatgcagtatcagggcagcaacagtaataatcgtaacagcaaataaagactcattggttcagctcctcctgagtcaggacctgtactgagctttaacaagctacacacatcactgaatcatacagaccacacttgggaagcaggcacccaaatgtcagcaatgagctgagacgggaagccctcawccttcatggcagggagaagtaggattcgaacccagatctggttgggtgtggtggctcaagcctgtaatcccagcatcccagcactttgggaggccaaggtgggaggattttttttttttttttttttttttttttttgcttgattttgaaacagagtctcactccgtcgcccaggctggagttcaggggcgccatctcag

SEQ ID NO: 812 - DNA, 401 bp, Homo sapiens
ttttttttttttttttttttttttttgcttgattttgaaacagagtctcactccgtcgcccaggctggagttcaggggcgccatctcagctcacttcaacctcctcctccttggttcaagtgattctcctgcctcagcctcccaagtagctgggactacaggcatgcgtcaccacatctgactaatttttgtatttttagyagagatggggtctcaccatgttgggcaagctgatctcgaactcctgacctcaaatgatccacccacctcggcctgccaaagggctgggattacaggcatgagccaccgtgcctggccaggaggattgtttgagcccaggagtttgagaccagacaaggcaacatagtgagaccccatctctacaaaagattaaaaataaa

SEQ ID NO: 813 - DNA, 401 bp, Homo sapiens
catgttgggcaagctgatctcgaactcctgacctcaaatgatccacccacctcggcctgccaaagggctgggattacaggcatgagccaccgtgcctggccaggaggattgtttgagcccaggagtttgagaccagacaaggcaacatagtgagaccccatctctacaaaagattaaaaataaattagccaagtgtggtgrggggcacttatactcccagctattcaggaggctgaggcaggaggatcactggagcccagcctgggcttctgaaggagacatgactgctaaggtcgaggcagtagtgagctatgattgtgccactgcactccagcctggggtgctgagggagacttgacacagacaggagagtgagactctggctcaaaaaaaaaataaga

SEQ ID NO: 814 - DNA, 401 bp, Homo sapiens
ctctgctaatttttgtatttttactagacatggggtttcaccatgttggttaggctggtctcgatcgcctaacctcaggtgatccacccgcctcagcctcccaaagttcatctggaattttgatgaagattgctgtgggcgggcacagtgggcagcagcgagacttcgtctaaggaaaaaaaaattaggtgtgatgacacrtgcctgtagtcctagttacttgggaggctgaggtgggaggatcacctgagctcaggagtttgagggtgcagtgagctatgatggttccactgcactccagcctgggcaacagagtgagaccgtgtctcaaaaaaaagttctgcccatcaaccaatgagtgcataaaggaaatgtggtacatatacagccgttaaaaggaa

SEQ ID NO: 815 - DNA, 401 bp, Homo sapiens
gtgatgacacgtgcctgtagtcctagttacttgggaggctgaggtgggaggatcacctgagctcaggagtttgagggtgcagtgagctatgatggttccactgcactccagcctgggcaacagagtgagaccgtgtctcaaaaaaaagttctgcccatcaaccaatgagtgcataaaggaaatgtggtacatatacagccrttaaaaggaatgaaatcatgtattttgcagccacttggatggagctggagacattattcttttttttgtttgtttgagaggaaggtcttgctctgtggcccaggccagagtgcaatggcaggatctcggctcactgcaaactcttgggcagatcatgaggtcaggagttcgagaccagcctgaccaacatgtcgaaaccc

SEQ ID NO: 816 - DNA, 401 bp, Homo sapiens
tactaaaaatacaaagaaattagctgggcgtggtggcaggtgcctataatcccagctactcgggaggctgaagcagagaattgcttgaacccaggaggtggaggttgcattgagtagggatcatgccactgcactccagcttgggcaacagagtgagactccgtctccaaaaaaattaaaatcaatcaatcgatcgatcgrtcaagtgacaggatagtgactgagggtgctccttagattaggtgctgcagaacacctctctgagatgacatctacatgatggtgaggatgagagaaacacggggagaactgcaggcagaggcaatgtggccacgggtcatggaggggccggtaggtgggtctgaggacgggagagaagctggtgtgggtgagggtcagac

SEQ ID NO: 817 - DNA, 401 bp, Homo sapiens
gcattgagtagggatcatgccactgcactccagcttgggcaacagagtgagactccgtctccaaaaaaattaaaatcaatcaatcgatcgatcggtcaagtgacaggatagtgactgagggtgctccttagattaggtgctgcagaacacctctctgagatgacatctacatgatggtgaggatgagagaaacacggggaraactgcaggcagaggcaatgtggccacgggtcatggaggggccggtaggtgggtctgaggacgggagagaagctggtgtgggtgagggtcagacagcagagggctgaaggcaggaaggtgacagggcgcagtgtggccaggaggactaccaaggaaaggctgtgaaaagtggtgactgtgaaaagtggtgacatgaaatg

SEQ ID NO: 818 - DNA, 401 bp, Homo sapiens
atgtggccacgggtcatggaggggccggtaggtgggtctgaggacgggagagaagctggtgtgggtgagggtcagacagcagagggctgaaggcaggaaggtgacagggcgcagtgtggccaggaggactaccaaggaaaggctgtgaaaagtggtgactgtgaaaagtggtgacatgaaatgtcttcaggatgggttttwattttttatttatttagtttttttgagacggagtctcgctctgtcacccaggctggaatgcagtggcgcgatctccactcacggcaagctccgcctcctgggttcactccattctcctgcctcagcctcctgagtagctgggagtacaggcacctgtcaccacgcccggctaattgttttgtatttttagtagaggcggg

SEQ ID NO: 819 - DNA, 401 bp, Homo sapiens
ctgtatttttagtagacacggggttccaccacattggccaggctggtctcgaactcctgacctcaggtgatcctcctgactcggcctcccaaattgctgggatgacaggcatgagccagcacacctggcccagggtaagttgttaaatggccggcaaggtgtctcacgcctgtcatccctgcactttgagagactgaggckggaggatcacttgagctcaggagtttgagaacagcttgaccaacatagtgagacctcatctctacagaatatttaaaaattatctgggcatagtggtgcacacctatagtcccagctatgtgggaggctaaggcaggcggcttgcttgagcccaggaattagaggctgcagtaagttatgattgcaccattgcattccag

SEQ ID NO: 820 - DNA, 401 bp, Homo sapiens
ggccagaaatggtgaccataggagctaatgatcagtcccctccttacaatgacagggttgataacagtgcttaccatgtgcctgggcctagcgtattctctgcatttaaacctcacaacaggctgggcgcggtgtctcccacctggaatcccagcactttgggaggccaaggcgggtggatcgctggagcccaggagttcragaccagcctgggcaacatggtgaaatcccatttctacaaaacataccaaaatcagctgggcttggtggtgtgtgcctgtaatcccagatgcttcggaggctgaggtgggaggatcatttgagcccctgaggcagaggtagcagtgagccaagatcacaccactgtaccccagtgtgggtggcagagtgaaaccctgtct

SEQ ID NO: 821 - DNA, 401 bp, Homo sapiens
gttaggtgactttctcaagatcacacagctaggaagtgccacttgaatccaggcagtaatccaaaatccatgttcttaaccactaaccactgtggtgtgccgtttcccaattcttttcctttttttttttttttttttttttgagacagagttttgctctgttgcccaggctgtagtgcaatggcccaatctcggctcacsgcaacctctgcctcccgggttcaagcgattctcctgcctcagcctcccaagtagctgggattttaggcaagcgccaccacgcccggctaattttgtatttttagtagaaacggggtttctccatgttggtcaggctggtctcaaactcccaacctcagatgatccacctgcctcggcctcccaaagtgctgggattacag

SEQ ID NO: 822 - DNA, 401 bp, Homo sapiens
cccatctctactaaaaatacaaaaaattagccgggcatggtggcgcatgtctgtaatctcagctactcaggaggctgaggcaggagaatcgcttgaacccaggaggcagaggttacagtgagccgagatcgcaccattgcactccagcctgggcaacaagagcaaaacttcatcttaaaaaaaaaaaagaaagaaagaaaraaaaaaaagacaatgttgaaatagagggctgggtgtggtgggtgaattgcttgagcccagaagtccaagaccagtctggacaacataaggagaccttgtctctacaaaaaagtaaaaaaatagccagccatgatggctcacacctgtaatcccagcattttgggatgccaagttaggaggatttattgagcccaggaggt

SEQ ID NO: 823 - DNA, 401 bp, Homo sapiens
tcctgtttcttaaaaaaaaaaaaaaaaaaaaaaaaaaaaaaaaaaaagccaggcatggtggtgcatgcctgtagtcccagctacttgggaggctgaactgagaggatcacctgagcctgaggaggtcaaggctgcagtgagccaagattgcaccactggactccagcctgggtgacagaatgagaccctgtctcaaaaaayaaaataattttttttaaacaataaaattaaaaaacataaaataaaattttttttaaaaagccactacccacttctgatggcccagctgctcccttgggaccctccaggcctctccatgccccagcatgaaaggattaacctgggttcaatagggggcttccctgatccagctctgggggccattgtccttcctgactggt

SEQ ID NO: 824 - DNA, 401 bp, Homo sapiens
ttactagatccagagagggcgagagggtcacacagcacttccctcctctaaaaaggtataagccataagcaaagacatggctgccaaactgcctgggttcgatgcccagctctgctccttctgagctgtgtgacactgggcaagggattcaacctctctgggcctcattttcctcatggggaaaatggagctcacactagygcctgcttcggagggttttgtgagggttaagtgagtgaatacatgtaaagccatcacaccagtgcccggcatctagtgagcactcagtaaacacgtgaactattgctattatttttagggaggtgcaaagtgggaggctgggggacacgtccccccacctacctggattttccggcttctctcctcttcactctctaact

SEQ ID NO: 825 - DNA, 401 bp, Homo sapiens
gtcatggctcaactcagctgctaagagcggggcgctgagtgtggcctctacaggcagtggcccaagcgcaggctggctcagtacccctgctgggaataggacccagctgtccccagctgtcgagggagcaagagagccttggggttatgaatcctttcctccccaacccaaagtccggctgtcggcttcaggcctggggcwtcagggctggatggtcctggttcatgtgtggtgaaggggcttcagcaaggacacaggtgtgtgagtctctgccagggccacagcctgatgccaagggcctggggctggccgaggatgcagagggacctggcatcgtgcagtggcttcgtatagtggactgtggtcctgcaggtgtgaggtgtgtggctctggcttgggtg

SEQ ID NO: 826 - DNA, 401 bp, Homo sapiens
gtatagtggactgtggtcctgcaggtgtgaggtgtgtggctctggcttgggtgtgtgacacatcagcatgtgtccacagtcagctgtggggcccaccacctgagaatggcctcatagatgccacctgccactagcaaccagattggttcacctgtatgggcccaggtgtgagtctgagaacagagggactgcatgtcaccrtgggagaagggccatgccttccaccattgtcgcaccatgaagaggaggactcgtgggtcctgtgtacactgtagcatacagaagtcacagaaggccaggcgcagtggctcacgcctgtaatcctgacattttgggaggccgacaagagagaattgcttgagcctaggagttcaagatcagcctgagcaacatagcgaggc

SEQ ID NO: 827 - DNA, 401 bp, Homo sapiens
cactgtgaccttggcctctcaggctcaagcaatcctcccacctcagcctcctgaggagctgagattacaagtgcgtgcatgccaccacgcccggctaagttttaagatttttggtagagacaggttttccccatgttgcccaggctggtgttgaactcctgacgtcaagcaatcctcctgccccggcctcacaaaatgcgygagccactgtgctgggccaatttctgttgttttatgtctttgagtggctgcggatcagcgcttgtgcttgaaggtggtcagttttttctttaggagataaggaagggccgtaacttgagtcattttgtgttccagtggggttgtgctgtgtctgcctacggctgtggcccatgccgctgtgtctgcgggtggctgtgact

SEQ ID NO: 828 - DNA, 401 bp, Homo sapiens
atgggggcacatgcctataatcccaactactcaggaggctgaggcaggagaatcgcttgaacctgggagggggatgttgcagtgagctgagatcatgccattgcactccatcctgggcaacaaaagtgaaactccatctctaaataaataaagggtgagttgtatggtatgtgagttatatctcaataagactgtgttttkttttttttttttttttttttttgaggcagaatctcgctctgttggccaggctggagtgcactggcatgatctcagctcactgcaacctctgcctcccaggctcaagcaattctcctgcctcagcctcccgagtagctgggattacaggggtgtgccaccacgcctggctaatttttgtatttttagtagaaacggggttt

SEQ ID NO: 829 - DNA, 401 bp, Homo sapiens
ggcacatgcctataatcccaactactcaggaggctgaggcaggagaatcgcttgaacctgggagggggatgttgcagtgagctgagatcatgccattgcactccatcctgggcaacaaaagtgaaactccatctctaaataaataaagggtgagttgtatggtatgtgagttatatctcaataagactgtgtttttttttktttttttttttttttttgaggcagaatctcgctctgttggccaggctggagtgcactggcatgatctcagctcactgcaacctctgcctcccaggctcaagcaattctcctgcctcagcctcccgagtagctgggattacaggggtgtgccaccacgcctggctaatttttgtatttttagtagaaacggggtttcacca

SEQ ID NO: 830 - DNA, 401 bp, Homo sapiens
gagatcgtgccatcacactccagcctgggcgacagagaaagaccccatctctaaaaaaacaaaaataaaaaacaactatccatagctacccatgaccttcagtctaaaggccaaactctggtttagcagtcccatctctgccagggacagtcccatttcagcaccagcacctttcactcgcagttccctctgccaggaagsttcttccctagaatatcatcagggctcactccttcacctccctccaatgtcactgttcagtgaggtcttccctggccacgctatttcacactgcaactctcgtgcccctcatccagctctgtttgatacataacacttaccactttctaacattatatatatatatatatatatatatattttttttttttttttttttt

SEQ ID NO: 831 - DNA, 401 bp, Homo sapiens
tcaaaaaaactgaccaaaagttggtctaatttttattttactttgcagtgacatttctaaacagtgtcaatgataaaatagtcctccccagggaagaaacagaaacaaaaaccttttggtggtctgctttctaaacaattgatgcaatataaaaaagggggaaaaaaacaattgatgcaattactgtcggttttttttttkttttgtttttgtttcattttttgagacggagtttcgctcttgttgcccaggctggagtacaatggcactatctcagctcactgcaacctccacctcccaggttcaagcgattctcctgcctcagcctcctgagtagcgcggattacaggcatccgccaccacgcccgactaattttgtatttttagcagacaggatttct

SEQ ID NO: 832 - DNA, 401 bp, Homo sapiens
tttgagaccagcctgggcaacatagcaagtcccctgtctccacaaaaaatttaaaaattagctggatgtggtggctcacatctgtagtcccagctacttgggaggctgaggtgggaggatcccttgagcccaggaggtcaaggctgcagtgagccaagatcactccattgcactccagcctgggcaacaagagcaaaactyccatctcaaaaaaaaaaaaaaaaagaaataatctaaaagtgttttcaataataatgcatttatgttgattaccttgttggctatcctctactcgtgtgcctgccccactccattcccctttctagagtctgttcacgtaactcctcttccaggaagccctctttgactcccaggcttggtcaggtgtcttctctgggttt

SEQ ID NO: 833 - DNA, 401 bp, Homo sapiens
tgcttctgttttctccggaagcgagtcatccactgggagtgtggtgttgctgaagctccatgcagtggctcaggtgctgctggatgagtgtggtggtgagggaggagtgaacagagaatgtgtgagggagggaggatgggggttggtcaaggaatttattctgtatgaaaacatgagggggcggagggccgaggtagatgrtagggccagcagattgttggagttgaggttctgaagggaatgaaccagacagataggatgcagtgggtagtgagtgagatgcatgagagggaggttctgaagaggtggcagttactgagacaggtctaggtgtgaccctgagaggaagcgggggggcgagggtgggaggagatcaggtggaggtcttgggacctagaggt

SEQ ID NO: 834 - DNA, 401 bp, Homo sapiens
aggcaggagatatgccattccctagcctgtagatcttactcagcttgcctcatctcagctactgcttgccctctgtctctgtaggcctttggcttgtgacccctaccttaaacatatgctccatttagtaaatggtaacacgtaacagttctttataaattgcacattacagtgtgagacagagagagagcatgcgcgcgygcgtgtgtgtgtgtgtgtgtgtgtgttacggctggctgttggggaaatccttatatcaggtagctgcagatatgcaggatttttttcttttccttttccccacccaggtggtaaatcctggtatttggagggtcctgaaatgtgtaatgttgctcaacaccaggccagatcatatatttcctcagcagaatagaaacttg

SEQ ID NO: 835 - DNA, 401 bp, Homo sapiens
cctcccgagtactgggactacaggcacctgccgccacgcccggctaattttttgtatttttagtagagacggggtttcaccgtgttagccaggatggtcttgatctcctgaccttgtgatctgcccgcctcggcctcccaaagtgctgggattacaggcgtgagccaccgcgcccggcctgagatgggatttcaacatgtkggccaggctggtctcgaactcccgacctcaggtgatctgcccacctcagcctctcaaagtgctgggattacaggctcgagccacgtggcccagccctctcctgcacttccaagggattttcgaaatgcatggacctctcaggttaattatagtgtctgtagaaccttaactgctgtaagctttccagcagactccacaga

SEQ ID NO: 836 - DNA, 401 bp, Homo sapiens
tttttgtatttttagtagagacggggtttcaccgtgttagccaggatggtcttgatctcctgaccttgtgatctgcccgcctcggcctcccaaagtgctgggattacaggcgtgagccaccgcgcccggcctgagatgggatttcaacatgtgggccaggctggtctcgaactcccgacctcaggtgatctgcccacctcrgcctctcaaagtgctgggattacaggctcgagccacgtggcccagccctctcctgcacttccaagggattttcgaaatgcatggacctctcaggttaattatagtgtctgtagaaccttaactgctgtaagctttccagcagactccacagacgtgttattagttgccaccctttctttactttcctcctcacccccatg

SEQ ID NO: 837 - DNA, 401 bp, Homo sapiens
gcccgcctcggcctcccaaagtgctgggattacaggcgtgagccaccgcgcccggcctgagatgggatttcaacatgtgggccaggctggtctcgaactcccgacctcaggtgatctgcccacctcagcctctcaaagtgctgggattacaggctcgagccacgtggcccagccctctcctgcacttccaagggattttcraaatgcatggacctctcaggttaattatagtgtctgtagaaccttaactgctgtaagctttccagcagactccacagacgtgttattagttgccaccctttctttactttcctcctcacccccatggatagtcgtgaccctggtggtcagagataagatgacagaagagctaaagtaaagctggtgttggcgatcagctg

SEQ ID NO: 838 - DNA, 401 bp, Homo sapiens
aatgactccattagccccaggaggccttggcccaccggccatgactaatgtggacattagagtgtggattccgatgtcctgcaagatcctcctcacaagtgtcatttcatggtttttttctggcaacatctttttgaaaactccctgtaaagaagtgctgatgttgatgctgaggcccaggaactttggagtttatttacytttttttgttgttttattttccttggcaggtgaagtaggagctagagtttacttattttgaagtttatttgaaatatgctttttatgattagaagccattttagaaatgagggcgaggccgggcgcggtggctcatgcctgtaaccccagcactttgggaggccgaggcaggcgggtcacgagatcaggagatcgagacc

SEQ ID NO: 839 - DNA, 401 bp, Homo sapiens
actccattagccccaggaggccttggcccaccggccatgactaatgtggacattagagtgtggattccgatgtcctgcaagatcctcctcacaagtgtcatttcatggtttttttctggcaacatctttttgaaaactccctgtaaagaagtgctgatgttgatgctgaggcccaggaactttggagtttatttacctttytttgttgttttattttccttggcaggtgaagtaggagctagagtttacttattttgaagtttatttgaaatatgctttttatgattagaagccattttagaaatgagggcgaggccgggcgcggtggctcatgcctgtaaccccagcactttgggaggccgaggcaggcgggtcacgagatcaggagatcgagaccatcc

SEQ ID NO: 840 - DNA, 401 bp, Homo sapiens
cactccagcctgggcgacagagcgagaccccatctcaaaacaattttatatgtgatagtttgtccatgtgtatgccagggtctgtcatttagagtgtatggcatgttcttaaaggggtgggggaacaaaaagatactataatagtttgtgaccttttgaagggccgctctacatgaatagatatatagtatgtctgtggtrttaaaattttgtggggcgattaggaaaaacatttccaaaaagtcttagggggaaggtagtaatgaaaaaaggttgagaaacaccattccagagagagggtccaagagctttcctcagttctgaaaatggtccatgatttgcacaaggtaaagaatggctgaatgcgaattaacagcagacagtttcttagaagatttgaa

SEQ ID NO: 841 - DNA, 401 bp, Homo sapiens
aaaaaaaacataaaatggagaggtagaccagcttacgggaggtgttgcacttccctctgccactggagagactctggatctgcagccagggagcttgtgaaggcttcttgtccacggaaatgagggcggcagttgtgactttctggatggtggcccagaggaagcaacactggcagagcctcttctgtgaagcagctctgmgagcaattttgtgacattgaaagagcaaaggataaaacgttgaaagctgatccagatctagaaaagtgtttggcaattgctggaaaaggtgtagaaatgatgcttgctctgtatcgtaagttatatggtgagaagaccacaagcacggttcaaactccccttagaaattcttttgcacagaaattaacactttaatccta

SEQ ID NO: 842 - DNA, 401 bp, Homo sapiens
cctaaatgtttccaatgttttaacttacagtatgctaaataaacattctttctgtttgtttgttttgttttgttttgttactctgtgcatttatagccaatagagtttttctttccttatttttttgacacagggtcttgctctgtcgcccaggctagagtgcagtggtgcgatctcagctcactgcaacctccgcctccygagttcaagtgattgtcccgcctcagcctcccgagtagctgggactacaggcgcgcgccactgtgccgggctaagttttatatttttagtagagatggggtttcgccatgatagccagggtggtcttgaaatcctgaccacaggtgtgagccactgtatctggccaaaaaaatttttttattttttgtagagacagggtc

SEQ ID NO: 843 - DNA, 401 bp, Homo sapiens
ccagggtggtcttgaaatcctgaccacaggtgtgagccactgtatctggccaaaaaaatttttttattttttgtagagacagggtctcactatgttgcccaggctggtcttgaactcgtgacctcaaatgatcctcctgcctcggcctcccaaagtgctgggattataggtatgagccaccatgcccagcttgacaaaaawatttttttttttttttgagagatgaagtttcactcttgttgcccaggctggagtgcaatggatcagctcactgcaacctgtgcctcctgggttcaaacgattctcctgcctcagcctccagaatagctgggattacaggcatgcaccaccacgcccggctaattttgtatttttagtacagacggggtttctccatattg

SEQ ID NO: 844 - DNA, 401 bp, Homo sapiens
tgtgcctcagctcatagcactcatgggagtctgtcaataactagaaccctaggagttatttttgcttgttttaaaaataagcttgttttggggccaggcgtggtggctcacgcctgtaatcccagcacttcgggaggccgaggcgggtggacttacaaggtcaggagatcgaaaccactgtggctaacatggtgaaacccygtctctactaaaaatacaaaaatcagccgcgtgtggtggcgggcgcctgtagtcccagctactcgggaggctgaggcaggggaatggcgtgaacccaggaggcggagctttcagtgagccaagatcgcaccactgcactccagcctgggcgacagagcgagactccatctcaaaaaaacaaacaaacaaagcttatttta

SEQ ID NO: 845 - DNA, 401 bp, Homo sapiens
ctgctacttagaactcttttactcaaatgaaatttgagtaaaaaaaaaaaaaattttttttttggccaggtgcggtggctcgtgcctgtaaacccagcactttgggaacccgaggcaggtggatcacctgaggtcaggagttcgagaccagcctcaccaacattgagaaaccgcgtctctcctaaaaatacgaaattagckggtgtgatggcgcagtcctataatcccagctactcaggaggctgaggcaggagaatcacttgaacctgggaggtggaggttgcagtgagccgagatcgcaccattgcattccagcctgggcaacaagagcaaaactccatcttaaaaaaaaattattataataattttcaagtatatacaaagcagtgacacattttgta

SEQ ID NO: 846 - DNA, 401 bp, Homo sapiens
acatggtgaaactccatctgtactaaaagttcagaaaaaaaaagcccagcatggtggcgcacgcctgtagttccagttgcttaggagggtgaggcaaaagaatcgtttgaacctgggaggcagaggttgcagtgagctgagatcgagtcaccacactccagcctggcgatggagtgagactctctctccaaaataaataartaaagttatgtttctacactggatgtgcatgtcttcaataatggggacaggggacaaaacacacaactgaaatacagttcagtgggtgggttgctgtctttattgttgggtgatgtgtttatacaaggaaggaagcactgagtgggcctgttgacgatctgggcttgggaaacagctcacaggggaactgctggaactca

SEQ ID NO: 847 - DNA, 401 bp, Homo sapiens
gcataggcaagtctctagtccagttgccagaagactgcttgatgaagagagaggcagaacgcggggagctggtttgcaaggtgaccgtttaatagcatcaggctaggccaggcccgaggatgcggaggagccagggttccctccatcttggacgaggtgtgggagataagcgctgtgtaaaatgtatcatgtgggccgggygcggcggctcacgcctgtaatccagcactttgggaggccgaggtgggcagaccaagaggtcaggagatcgagaccatcctggctaacacggtgaaactccgtctctactcaaaatacaaaaaaaaattagccgggcctggtggcgggcgcctgtggtcccagctactccagaggctgaggcaggagaatggtgtgaaccc

SEQ ID NO: 848 - DNA, 401 bp, Homo sapiens
agcactttgggaggccgaggtgggcagaccaagaggtcaggagatcgagaccatcctggctaacacggtgaaactccgtctctactcaaaatacaaaaaaaaattagccgggcctggtggcgggcgcctgtggtcccagctactccagaggctgaggcaggagaatggtgtgaacccgggaggtggagcttgcagtgagcygagatcgcgccagagcactccagcctgggcgacagagcgagactccgtttcaaaacgaaaaatttgtcatgttaacctttaaaaaaagtgtcgtgttttgttttgtttttctccccccaaagagattaggtctttttatgttgcccaagctggtctcaaactcctggcctcaagtgatgccccccacccttcacccagtg

SEQ ID NO: 849 - DNA, 401 bp, Homo sapiens
ggtgaaactccgtctctactcaaaatacaaaaaaaaattagccgggcctggtggcgggcgcctgtggtcccagctactccagaggctgaggcaggagaatggtgtgaacccgggaggtggagcttgcagtgagctgagatcgcgccagagcactccagcctgggcgacagagcgagactccgtttcaaaacgaaaaatttrtcatgttaacctttaaaaaaagtgtcgtgttttgttttgtttttctccccccaaagagattaggtctttttatgttgcccaagctggtctcaaactcctggcctcaagtgatgccccccacccttcacccagtgtaagcactggtattacagttgaattagttagatgagttgatacagttaagcaattatttggccctg

SEQ ID NO: 850 - DNA, 401 bp, Homo sapiens
ctcaaactcctggcctcaagtgatgccccccacccttcacccagtgtaagcactggtattacagttgaattagttagatgagttgatacagttaagcaattatttggccctggaagtcactgtgttttgattgtttgtttctttctttgagacggagtttcactcttgttgcccaggttggagtgcaatggtcaatggtgygatctcggctcactacaacctctgcctcccaggttcaggcgattctcctgcctcagccacccgagtagctgggattacaggcatctgccatcacgcctggctaactttttgggtttttttgtttgttttttgagacggagtctcactctgttgcccaggctgagtgcagtggtgcgatttcggctcactgcaacctccgc

SEQ ID NO: 851 - DNA, 401 bp, Homo sapiens
gcccaggctgagtgcagtggtgcgatttcggctcactgcaacctccgcctcccgagttcaagcaattctcctgcctcagcctccggagtagctgggactacaggcgcgtgccaccacacccggctaattttttgtatttttagtagagatgggttttcgcagtgtcggccaggatggtctcgatccctgacctcgcgatcygcccaccctggcctcccaaagtgctgggattacaggcgtaagccaccgcacccggccctaacttttgtatttttaataggttttgccatgttggccaggctggtctcaaactcctgacctcaggtgatccacctgccttggcctcccaaagtactggaattacagccatgagccaccacacccggccaagtcactgtctt

SEQ ID NO: 852 - DNA, 401 bp, Homo sapiens
tgggctgccggcttctggctccagcatccttatgggggagtttatactgtccagctgacacaggggccggggatcctgcagcacttcctggctggcccccatctcctcctggaggatgggatggaggtggctgctgcccatgaggctcaggcccctccttgctgtgcgggcctccagctgctctgctgaccccactccccrcccaccctcctgtctgcctgttctgtctcctctgcttcctttgctccctgttgccatcgctgtcccctgccccgtgggcatcctctgtcctctgccacccccgcctccccgccactgcagcttgtgatctcaagatgtgtgttagcttgctttgtagtgctggcggctgctgccccattcctcctttatggtttaaggac

SEQ ID NO: 853 - DNA, 401 bp, Homo sapiens
tggcagctcaactccatccgggcctctggactctttccagggcgactggtgggcctcaccacagcagacactcttcaggctgctgccgccgtggcccttgaagctcagctgtgtcatgtgttcaattcttggggcattttacggcctgacaaaggccctctttttgttggaaaggccacccaacagtgggtcagtggcctmggcattcagtggccacttcacatctctgtctccctcgggttgctggcaccattgagaggtggaatgggctttataaaaaatcaactcattgctggtccaagtgcagtagtgtaacaagtaattgatcacaaccagttacagagttctttgttccttctgctgctttccttgaccagcctgaaaaaaaatcagctcaccga

SEQ ID NO: 854 - DNA, 401 bp, Homo sapiens
ccctcaggttgtgtgtttgcatgtgggaaggtggcccacagaatgtctctcctctggggaggaggttgttttttgggtttgtaatgacaggcaatgacaccaaagatcagatcagacttgactcccttgtgtgaatcctagtgaagtgctcccaaacctttctggcaccaaggactggttttgtggaagacagtttttccrcagaccagggtggtggggggtagggggtggtttcatgatgaaacttctacctcagatcatcaggcattagattctcataaggaagctgggtgcattggctcacacctgtaatcccagcactttgggaggctgaggtgggtggatcacttgaggtcaggagttggagaccagcccggccaacatggcgaaaccctgtctct

SEQ ID NO: 855 - DNA, 401 bp, Homo sapiens
aagtaactggattacaggcgccaagtaactggattacaggcgcccaccactacggcctggctaatgtttgtatttttagtagagacggggtttcatcatgttggtcaggctggtctcaaactcctgacctcaggtgatccacccgcctcagcctcccaaagtgctgggattacaagtgtgagccactgcgcccagcccccmaaaaattttttgtatgagccaagcatagtggtgcatggctgtagtcccagctactcaggaggctgaggtaggaggatcccttgagcccaggaggttgaggctacagtgagctatgatcataccactgcactccagcctgggtgacagagcaagaccctgcctcaaaaaaaaaaaaaaaaaaaagttactgggtgcggtgg

SEQ ID NO: 856 - DNA, 401 bp, Homo sapiens
aagcctgaagacggacccaggtctcctcaattccaaggcaagcagcactggccccagcctctctgcaagccccacttcccttttctttcccctacttcttcttcttttttttttagacagattctcgctcttgtcacccaggctggagtgcaatggtgcgatctcggctcaccacaacctccacctcccgggttcaagcarttctcctgcctcagcctcctgtgtagctaggattataggcgcacgccaccaagcccaggtaatttttgtatttttagtagagatggggtttcaccattttgggcaggctggtctcgaactcctgagctcaagtgatctgcctgccttggcctcccaaagtgctgggattacaggcgtgagccaccagtgcctgacccaga

SEQ ID NO: 857 - DNA, 401 bp, Homo sapiens
cctcccaagtagctgggactacagacgcccaccaccacgcccggctaatttttttgtatttttagtagagacggggtttcaccgtgttagccaggatgggcttgatctcctgacctcatgatccgcccgcctcggcctcccaaagtgctgggattacaggcgtgagccacctaacccggcccagagtgatctttttaaatrcaaataagaccacgtcatcctctgcctaagatcactattcactgtgctctgaaaaaaatccaaaggcctgctaggccctgcatgacccactcctgccaaccaccatggtttgcaacctctcctggggatcccatgcaccagccagccacatggcctttcaggccccgactctgccaagctccttgcccccactggctttt

SEQ ID NO: 858 - DNA, 401 bp, Homo sapiens
acctaagccgcggttcggagcgtgcccgcccggctcccgtacccacgccccgccggcgaagagacagccaatggacgtcaggattgagggaaggcctcgcccccacccccccgacccctccagccccccccttcacggaggcctggacgactgggcggtgccttacgtaagaggcggagactgggctactgggctcatgcwgtaaagcgagtcaaggcctgagtggcaggagggcgaggccgggaccaatcccaggaggaggcggtgtctgccacgacagaaaatgagtgtctgccccttgccggggctcacgcccctaactccagcactttgggaggccgaggcgggaggattgcttcagcccagggattcgagactagcctgagcaacatagtgaccct

SEQ ID NO: 859 - DNA, 401 bp, Homo sapiens
ttgcctcctgggttcaagtgattctcctgcttcagcctcccgatagctgagattacaggcgtgtgccatcgcacctggctaattttttgtatttttagtagagacagggtttcgccatgttggccaggctggtctcgaactcctgacctcaggtgatccacctgccttggcctcccaaagcactgagattacaggcatgaracaccgcacccagccttatgtatatatatttaattaataaagcaagtactgccaagtgcagcggatcacgcctgtaatcccagcactttgggaggccaaggcgggcagatcacctgaggtcagtttgagaccatccttgccaacatggcgaaaccctgtctctacttaaaatacaaaaattagctgggtgttgtggcggg

SEQ ID NO: 860 - DNA, 401 bp, Homo sapiens
tgcctcctgggttcaagtgattctcctgcttcagcctcccgatagctgagattacaggcgtgtgccatcgcacctggctaattttttgtatttttagtagagacagggtttcgccatgttggccaggctggtctcgaactcctgacctcaggtgatccacctgccttggcctcccaaagcactgagattacaggcatgaamcaccgcacccagccttatgtatatatatttaattaataaagcaagtactgccaagtgcagcggatcacgcctgtaatcccagcactttgggaggccaaggcgggcagatcacctgaggtcagtttgagaccatccttgccaacatggcgaaaccctgtctctacttaaaatacaaaaattagctgggtgttgtggcgggc

SEQ ID NO: 861 - DNA, 401 bp, Homo sapiens
tgggttcaagtgattctcctgcttcagcctcccgatagctgagattacaggcgtgtgccatcgcacctggctaattttttgtatttttagtagagacagggtttcgccatgttggccaggctggtctcgaactcctgacctcaggtgatccacctgccttggcctcccaaagcactgagattacaggcatgaaacaccgcrcccagccttatgtatatatatttaattaataaagcaagtactgccaagtgcagcggatcacgcctgtaatcccagcactttgggaggccaaggcgggcagatcacctgaggtcagtttgagaccatccttgccaacatggcgaaaccctgtctctacttaaaatacaaaaattagctgggtgttgtggcgggcatctata

SEQ ID NO: 862 - DNA, 401 bp, Homo sapiens
attccaggtagtcagtccaagtcgtactgcatggtcagagacctaggctccttctcagcaaaaccctggtgttcctgcctaactcctctgcgcaacttccattcccaaggtcgcctaatggtccaagatggctgtgtagctccagcctccatgtctgtgctccagccagcaagaggagggaggaaagaagggagactggcrtccctcgctccttaaggacccttcctggaagttgcctgactctttcatgaatacctcattggccagagattagtcacagaaccacacctggctctgcaagggaggagggaacgtcctgattccaaaaggccatgtatccagctaaaacccagggggagccttttaaaattattattattgttattattttttaaagtaga

SEQ ID NO: 863 - DNA, 401 bp, Homo sapiens
ttcccagacggggtggcggccgggcagaggctgcactcttggcactttgggaggccaaggcaggcggctgggaggcggaggttgtagcaagccgagatcacgccactgcactccagcctggacaccattgagcactgagtgaaccagactccgtctgcaatcccggcacctcgggaggccgaggctggcggatcactcgcrgttaggagctggagaccagcccggccaacaccccgttagcctattcctgagtagaaaatggcagccttccgttttcctaccagccaccacctcgccccagctatgggttatttgaactgtttgttggactttggggagacctgttcaccccttcatttctgcctctcccctccttcaaccccagattacgctcaaggata

SEQ ID NO: 864 - DNA, 401 bp, Homo sapiens
ctcgggctccaccagggacgtccggcgggagtcgggggcgcggtccgagggctgcacttttcgggagcccccgcccgcggatggctccgactgcaagttccccatttctgacggagctcggagactagtcagaaaaatttactccagtcagcctgccagggccgtggggaccctacgaggctggctgtacttgatctaatkcgtccgcaccggccccgcccctgttctccaagatccgatcaggcccaagtccttaggtcgcactcctgttccccgaccttcgacactcacgccttcttgcccatgtccccaacacagctgctgttaagatacttcactaccagccccattatgtactaaggttccatgcctgtccccttggctggtcatgctgatccctc

SEQ ID NO: 865 - DNA, 401 bp, Homo sapiens
ctgaggcagaagacttgcttgaacccaggaggcggaggttgcagtgagccgagatcgtgccactgcactccagcctgggcaacagagcgagtcttagtctcaaaataataataataataatagtaataatagtaataataattctccctctgcctggtgcctcccagaggctgctgttcctgataggggaagagggtaatrgagagacaaggatggtgggagcagggaggctgctgaatccaagcttcagacgaaagtagaatccagaaatttttgccagctgttgtgacttcgtgttagtcacttaatttctctggggctcaatttcctcgaaggaaaaatgaggatagtccttggaccttctccagggatttcttttttctttctttctttcttttttt

SEQ ID NO: 866 - DNA, 401 bp, Homo sapiens
gctcactgcaacctccgcctcctgggttcaagcgattctcctgtctcagcctcccgagtagctgggattacaggcatgcaccactacgcccggctaatttttgtacttttaatagagatggggtttcaccatgttggccaggctggtctcgaactcctgacctcaagtgatgcgcccaccttggcctcccaaagtgctggrattacaggaatgagccacctcgcccagcctgccttcattctaattcaggaaaagtttgagaatcaatgtggtaatgattgggctctctgtcgctgctttgcactctggctttgccatttgcctgcttcctaatttggggcaagtgatttttatttttctctctgagcctcagtgttctcatctggaaaatggggacaaga

SEQ ID NO: 867 - DNA, 401 bp, Homo sapiens
caaagtgctgggattacaggcgtgagccaccgcacccggctatttttggttttgtttgtttgtttttgagatggagtctcactctgtcacccaggctggagtgcaatggctcgatctcagctccctgcaacctctgcctcctgggttcaggcgattctcctggctcagactcccgagtagctggaactacaggcgtgcacyaccacaccccgctaatttttgtattttttagtagagatggggtttcaccatgttggccaggctggtctcgaactcctgacctcaagtgatccacctcctcggcctcccagagtgctgggattataggtgggaactactgcgcccggactcaatactgtcctttatggtacttccaggatccagcccgggctgtcacattg

SEQ ID NO: 868 - DNA, 401 bp, Homo sapiens
gtctgagagggcaggggatcgaggggccgagggccttggatccaaggcaaaggggcctggagggtcaggggacacccgcaggggcctgacttgggagactgggggctgagaggtggaaggagcctggggtctgaaaggaggagacctggaggaggggcaggggctggcagaccaggggatgtggaatctgatgggggggamgtttcagagtctgagcgagtggggtctgaggagcagagtcttgagtttaggagttggacggtgggagactgaggagggagtataaggttgagcgccctcctgtgtctgtgaagcagaggtcagaggtgtttgaaggaaaaggcaggagcgaggactgtgtgatggtggaggcaggaggtggggcttcctttggggttgga

SEQ ID NO: 869 - DNA, 401 bp, Homo sapiens
tcatttcctgatctgtgatctctgatgactctgtctcccatctgccggtttccgggtatccacccttgatttctggcctctgacgctgggactctcgcccacccctgcaatcgtctctgactgccgcatcctggtggcccccagcacctgtcgaccgccagtggggagctccaggttgacgcttccttcatgcagacactrtggaacatgaaccccatctgctcccgctgcgaagagggtgagggccccagacctccccctaaatggagatccccccaaaacagacccttaatgttgcccttcaggcatacccaaatggagccttggaacctcagacctcaaacctagatctccaaattatggctctcacacttagatctccagctgaccccaaatccaga

SEQ ID NO: 870 - DNA, 401 bp, Homo sapiens
aattatggctctcacacttagatctccagctgaccccaaatccagacccccagagctcagaacccccccaaaccccgaactaaatatcaggctcccaaacttagaccccaaagtattagcccccaaggctcctaaactcagattcaaatcttaaaacatcaagtttaaagcttgtttaaaggccgggcatggtggctcacrcctgtaatctcagcactttgggaggccgaggcaggtggatcacctgagttcaggagtttgagaccagcctggccaacatggcgaaaccccatctttattaaaaatgcaaaattatctgagtgtggtggcatgtgcctgtaatcccacctactcaggagggtgaggcaggagaattgcttgaacctgggtggcagaggagc

SEQ ID NO: 871 - DNA, 401 bp, Homo sapiens
tatctgagtgtggtggcatgtgcctgtaatcccacctactcaggagggtgaggcaggagaattgcttgaacctgggtggcagaggagcctgggtgacagagccagactctgcctcaaaaaaaaaaaaaaaaaaaaaaaaaaattaaactccttagacaataagcatagactatgatctcagcccctcaaacccagaccccyaaattcaaacctcagatccccaaaccaagactccaatcttcagccctccaacctcagacttccaaacttcaatttcaaatcccaaaaaccaaaatccaccaaagcaaactcccaattcagattcccatgctaagactccaggcatggcccaatactttgaccccaagtctcataccccaaacttcagagtcctaaaccag

SEQ ID NO: 872 - DNA, 401 bp, Homo sapiens
ccacgctgggactcaaaccacagatggtttttgaccctcaaactcagaccctgaaactcagactcatcaacttctaactacaaagctcagatcgttcctacgtcataccccaaagctcagacttccaaaccctagattgtaacctcagatccccaacctcactttccagcttctggcctccaaaatcaatactcaaggccragcgcggtggctcacgcctgtaatcccagcactttgaggggccaaggcgggtggatcacttgagatcaggagttcgagaccagcctgggccaacatggcaaaaccccatctctactaaaaatacaaaaattggctgggcatgatggcgggcggctgtagccccagctacttgggaggctgaggcagtattgcttgaatct

SEQ ID NO: 873 - DNA, 401 bp, Homo sapiens
ctcagatccccaacctcactttccagcttctggcctccaaaatcaatactcaaggccaagcgcggtggctcacgcctgtaatcccagcactttgaggggccaaggcgggtggatcacttgagatcaggagttcgagaccagcctgggccaacatggcaaaaccccatctctactaaaaatacaaaaattggctgggcatgrtggcgggcggctgtagccccagctacttgggaggctgaggcagtattgcttgaatctgggaggcagaggttgcagtgagccaagattgcaccactgcactgcagcctgggcaacagagcaaaactctgtcttaaaaacaaaactaaacaaaacgaaacaaaaaaaccctcaaaattcaggccctaactccagaacccagc

SEQ ID NO: 874 - DNA, 401 bp, Homo sapiens
aaccccatctctactaaaaatacaaaaattggctgggcatgatggcgggcggctgtagccccagctacttgggaggctgaggcagtattgcttgaatctgggaggcagaggttgcagtgagccaagattgcaccactgcactgcagcctgggcaacagagcaaaactctgtcttaaaaacaaaactaaacaaaacgaaacmaaaaaaccctcaaaattcaggccctaactccagaacccagcctcagacccaaccatcacccttctaaacccagaggccaaacctcaaccctagaactcagactccaacaccagtgaacattagacctccacctttcaccacacacacactctgaccccaacctcaaaagtccaaactcagaaccttaaatgacagactca

SEQ ID NO: 875 - DNA, 401 bp, Homo sapiens
  misc_feature (201)..(201): Nucleotide optionally deleted
ggcaacagagcaaaactctgtcttaaaaacaaaactaaacaaaacgaaacaaaaaaaccctcaaaattcaggccctaactccagaacccagcctcagacccaaccatcacccttctaaacccagaggccaaacctcaaccctagaactcagactccaacaccagtgaacattagacctccacctttcaccacacacacacwctgaccccaacctcaaaagtccaaactcagaaccttaaatgacagactcacaactcccccagcctcagctctgcagacccagaccccccaaattaggtgcccagcttcagaccccaagtctcatatccccacttcaggcctcaaccttggcctgaaaataccctgaaactcagacctccaactgcaaaaccccaaactca

SEQ ID NO: 876 - DNA, 401 bp, Homo sapiens
actaaacaaaacgaaacaaaaaaaccctcaaaattcaggccctaactccagaacccagcctcagacccaaccatcacccttctaaacccagaggccaaacctcaaccctagaactcagactccaacaccagtgaacattagacctccacctttcaccacacacacactctgaccccaacctcaaaagtccaaactcagaaycttaaatgacagactcacaactcccccagcctcagctctgcagacccagaccccccaaattaggtgcccagcttcagaccccaagtctcatatccccacttcaggcctcaaccttggcctgaaaataccctgaaactcagacctccaactgcaaaaccccaaactcagccctcaggttcccccaggggaggagcagggcc

SEQ ID NO: 877 - DNA, 401 bp, Homo sapiens
agatggagcctccatgttggacatgcgtagccccaggtataccttttctatcggcacattcccccatgcaagcttgtagctcgattttccaggctgctctttgttagaaaagaaattattttgggggctgctttccgttagaaaggaaactctgccgaggactctgttgcccttactctctgcctaaataatttttttctrcctcttgtatcagtgccatcaaccaagttaggggacagtcagtgttggctcagaaggacagggatcttaggctttactgccagtgcctagaacagagccacttactacagccttgctgaatggacaagtaggaatccttggggaggcactcgtttgcaaaaacaggcctgtagttgaatacatgagccaagggcgtagag

SEQ ID NO: 878 - DNA, 401 bp, Homo sapiens
taaaaaacaaggttatgtaataagtggttgatgaaaatactgtcacagactctcagggactccctgtatttcccctagaagcagtggttcagtatttgataattcagtcttcataatcactttatagaacataactatgaataatgagaattgattgtatatgttttatgtacttttctgtatgtatattatgattcacartgaaataagaaaaaatattaaaatgtaaaaaaaaaaagaaaagaaaagataaagtgagaaaaatctttctgatggttggtgtggagaatgaactgggcctctccagttggtgggagtggggttccagttggatggttggtgggagtggggttcctggaagtgagtaggatggagagaaaagtgcaggaaggggaagtata

SEQ ID NO: 879 - DNA, 401 bp, Homo sapiens
gcctggccgtgagcttctgctgcagacaaacctcatcaactatgtcaccaggtctggctctcaacatctgaccccagaactcagaacctctcaaccctctccctgacttagagactccacacccagatggatgtcctttccttaatctcccaccccagggttaacaaccagtcctcacagatgtccactgtggccccactstcccttggcatccactcctcttgttctgtcttcctggctccatttctgcctctatctgtttctctttctttctccctctccctctctctctgttttctctttttatctttgcctgtttctgtcttgattcttcctccatgtctttctccctgtctctctcccatctctctctctctgtctttggatgtctgtctctctct

SEQ ID NO: 880 - DNA, 401 bp, Homo sapiens
gaccttgcagtcatctgaactcttctagattaaccagagaccctcccgctctcaactccctggctcttaattcccttatgatattcctttgactctagactttcttttatgacttctaaatgacctccaggacactatgactgcccggtgacctttggtctccccagaactttccattgatcccaggactgcttccatgtyccccactgaccacagactgtcccccataacctcccctcaatgatccccattgtccttccttacccagggtgcggttcctccttggtggccgccatggtgaattcaagttcctgcccccacctggctatgctccatgccatgaggctgtgctccctcgagagcgactccatcttgaacccatcaaggagtatcgacgggag

SEQ ID NO: 881 - DNA, 401 bp, Homo sapiens
cctgagaatggccccctgagacccgggagaccctaatcctcaaccccatctgacatcgtgtcaggatccatgggttgatgaagaagccataataggccagatgcggtggctacacctgtaatcccagcactttgggaggccgaggtgggaagatcacctgaagtcaggagtttgagaccagcctgggcaacatggtgagamcctgtctctactaaaaatacaaaaattagcctagtgtggtggtgtgtgcctgtagacccagctactcgggaggctgaggtgggaggatcaccagagcccgggaggtccaggctgcagtgagctgtgatcacaccactgcactccagcctgggtgacagagcaagaccctgtctcaaaaaaacaaaccccaaaaacaaacc

SEQ ID NO: 882 - DNA, 401 bp, Homo sapiens
ttcagcagctaatcctatatttgggacttgcagacctattttcagatgcaagcactgaatcagaaaagtagaattggaaaagcttagggatggtcttctctagagcttccaaacttgtctttagtaatgaaaatcttttttcagacaatattttcaatgtaccataggtaggcatgtattccttggtattttgtctctttkataaaatatacctaaattttatttgagaaactacccttttcacatatagtatgtaggattgaccccaaccaccagctctaatttgggtcagtaattggtttaagccatgcatcaggttgtatttctctggaaccatgattgctttagggtaggcaagtgatctctgctgattcaaccagattgatcctcaaagaattgcc

SEQ ID NO: 883 - DNA, 401 bp, Homo sapiens
atctaaagatcagtcattacatgacccctttccaaagtttaagaagtgttttatagaaatgtgtctgattaaaagcttggtactcaatacaaaaatgtttttatccttctggttgatggaatggaagtcgtacatgtaataatgaggcagaataagttctgaaggcaggcaacctcaggctgattcaaacttacttcctasaactaaagcaaaaggaaaacctcaactttccatgcccaagtaacaaaagaaccagaggctactccctttgcaacccccagttttctgtgcgacagatgaaaaactaaaagtacctctgattggtcccttcccacaaccaatcaggctggctgcgggccaagtcttcctttgtataggagtataactttgtaacttcaggt

SEQ ID NO: 884 - DNA, 401 bp, Homo sapiens
taaccaccagtctattctctgtttctaggagactgactttttcagattccacatataagtgagagcatataatatttgtgttcctgtgcctggcttatttcccttagcataatgtcctccagttccatccatgctgtcacaaatattagaacttccttatttttaaagactgtatagtataccattgtatatgtatactayatttttaaaaatccattaatttgttgatagattagattgcttccataacttggctggtgtgaaaaatgttgaaattaacatgggagtgcagatatgtctttgacatactgatttcaattcttttgaatattgatttcaattcttttgaatatacacccataaatgggattgtggattatgtggtcattttatttttagta

SEQ ID NO: 885 - DNA, 401 bp, Homo sapiens
ttcgctcacctcaccctagtcccagcactgaagaaaacatcagcaaaataagacagagcccttgttctccagcttttacaatccaatgggaggtcaaagtaagtagacacatactagctaacataaatgctcttctaagtacactacataaattaattcatttaattcttccagcaattttatgaggcatatactacttayaaatcctgttttaccaaaaaagaaataataataaagaaaaaaagaaagaaaatttagggacagagcagttaagaaacaaattcaaagtctaagagcctgtaattgaacccagacagcctggctccaatcctgaaaaatcaaccactgagtagtctctagattaagacaggtggttgtagttttttatttaaaagatcatc

SEQ ID NO: 886 - DNA, 401 bp, Homo sapiens
agttcccatgcccagtacaggtcctggtatgtaaagggcacccaacatgtatgttgaatagatggatggatggatggatggatggatggatggatggatggataaatggatcagtagatggatcaatgggtggatgaataagtgacaaattgaactggttttgtctgcccttttggccctttccttgagtctgtatcactmacccatcacttgaagccagtggtgggtgctagctcaactatggcatttgcccagggtctttgcacttgctatggaagagatatgctcttgtatgaattatttaccttcttcattctacttgccatttggattccagatcaaatatgttttcttcagaggttttttccctgatcacctcttactgttacctgcttagtcct

SEQ ID NO: 887 - DNA, 401 bp, Homo sapiens
tactgcctagattcaaggttagggaaaacagactacatttatttatttattattctttttctttttcttttttgccctcagccagtggaagttgagaaagagactccattacttgatggaagaatgataaggttccaaagagtctgtgagatgggtggtattgtttgaaccatcttcagaaaataaaatatgccacaggcytcctaatactgagtcccagaattagagggacatactcttcttgtcataggcagctctggtaaacccacactgatgcctgcccctgtaaaacttagggcatagagcaactgatgggagagaaaagttacactgaactgaattctaaaacccaatcttagccaattaaacacaaagaatcatctgctagagtttctaagaga

SEQ ID NO: 888 - DNA, 401 bp, Homo sapiens
tttcttagaatatatgttctctttgttctgggtttcttggaatgaaatgatttttcttggaacactttcgaatcccagccactggaattcatgctgtcaaaaagtccacgccagacatgcagagtagatacaagatgaaataaatgcttgaccagccttcagctgtgctatccattatgaaaaaggcatcagatgtgtgartgaagccaccttggaaccctcagatcagcccacctgccagctgagtaccactgaatgcaagctgagtaccaccgagttaccttgcttgatgttccttggaacacaagaagaaagcagccaagctctgcctaaattctagaggcacacagtagagcatctgtggccactgtagttaaggtgaaaaggaaaaaggaatgaat

SEQ ID NO: 889 - DNA, 401 bp, Homo sapiens
ccaataagagacatttggagtcaccaggcttcgtggaagaggtgcagccttcgccagaccaggtgccacccactttgtgattaattgatgtaccagctccccctctatccttcattcccctttctcattttcccttgtcttcactccattctctttaccatctccccttggcctgggtcccttctacttctcagattcccrtcttttccttcaaggcttttcctgcctgctcaccctaatccacaagttctgctttctcgtaacatctgtaacttttttgtttactagcagtttccaaatcctactgcccaccaacatcaccttaggagccttaaaaactaaaaagccccataacaggccctaccctcaactctgcagatgattccagggcatcatttttc

SEQ ID NO: 890 - DNA, 401 bp, Homo sapiens
tttccccagagctgcatgtgcagcaagggttgagatgaaaaccttgttgaccccactcgcctgccatctacccatagcagcttgcattacagagagaggcagagtttacaaaggcctctgcacgcatcatcccatttgattcccacatcagaccggtaaaataagaagtgagaggtgcttagtccattttacagatgggaraactaagtcatagagaagtgaagtcacaagcccaagttgcccagatcttggacccacatcttctgacttgccctgtgctgcttggagaatatatgtatggttagaatgaaggcaaagccctgccttgctctctcaatgcccccatttccccagcctaacacatttaagctactcagctcagagctaactgatggttgatg

SEQ ID NO: 891 - DNA, 401 bp, Homo sapiens
ctattattaattattaatattattattattttgagacagagtcttgctctgttgcccagggtggagtgcggtggtgcaatctcggctgactgcaacctccacctcatgggttcaagcaattctcctgcctcagcctcctgagtagctgggactacaggcacctgccaccaccacgcctggctaatttttgtatgtttaatrtaaatggagttttgccatgttggccaggctgctcttgaactcctgacctcaggtgatctgcctgcctcggcctcccaaagtgctgggattacaggcgcgagctaccgcacccagctccaacttgattaatttaatttagagtgacgttaactctattcattcactagaaaactgtctactggtgtggaccaagtctgagg

SEQ ID NO: 892 - DNA, 401 bp, Homo sapiens
ttggggagtgagacgaagcaaagtccgactcttattgcaggggtaggaagctagggaactgtgggcagagatttgaaactgccacatggagatgtggagagagtgggagcactggagggccaatggggtgttggtggaacaaggtcaaattgaaatgtttggatgacagcttcgagtgaagcaaaattagaaatagggccwcctcataaaactgaagaatcacacttcagacttgttccgggttaaattttgtttacaaaagcagggggcagcagactggatttggcccatgggctgtggttttcctacttctgctccagatgggagactggaggttcagggaaaagcatatactaaccatggtgggaatctcttttggagaggaatgcattaagtgaaac

SEQ ID NO: 893 - DNA, 401 bp, Homo sapiens
ttgcactccagcttgggcaacaagagtgaaattctgtctcaaaaaataataatagaaaaaaagaatgtatagtctcctgggtcaaagagatctgaatttggattttgcctagatacatcattaattcatttcaaaatacttatcaagtaggtattctttcttcacttggcttccaagatgccaccctctcctaaatttccyccttcctcactcaccaattcttatcaatcttctttgccagttgctcccagtcttcctaatctctcagcaccaagaccacagctcaggtcttggccccactcctcttttccgcctgtactcacctggtgcttgtgccgagagttcattcttcccattgtatttactaacaccaatgtgctgatgacttccaaatttatact

SEQ ID NO: 894 - DNA, 401 bp, Homo sapiens
aatgtgaaagacttttggcttctacttaggatatagaaagcaggaaagagtagcactcctagaagtactagaaaataatgctaaagaatctgcagattcacagctctttatttttatttatttatttatttatttaaactaatcagagaactgaggtcgcaagacaacaaactggtcctaaataaaaagtaagaaaaatgycggggaggagccaagatggccaaataggaacagctccggtctacagctcccagcgtgagcgacgcggaaaatgggtgatttctgcatttccatcggaggtaccgggttcatctcactagggagtgccagacagtgggcacaggtcagtgggtgtgcgcaccgtgcgcaagccaaagcaaggtgaggcattgcctcacttg

SEQ ID NO: 895 - DNA, 401 bp, Homo sapiens
cacgcagctggagatctgagaacgggcagactgcctcctcaagtgggtccctgacccctgaaccccgagcagcctaactgggaggcaccccccagcaggggcacactgacacctcacactgcagggtattccaacagacctgcagctgagggtcctgtctgttagaaggaaaactaacaaacagaaaggacatccacaccraaaacccatctgtacatcaccatcatcaaagaccaaaagtagataaaaccacaaagatggggaaaaaacagaacagaaaaatgggaaactctaaaacgcagagcacccctcctcctccaaaggaacgcagttcctcaccagcaacggaacaaagctggatggagaatgactttgacgagctgagagaagaaggcttcaga

SEQ ID NO: 896 - DNA, 401 bp, Homo sapiens
atcatcaaagaccaaaagtagataaaaccacaaagatggggaaaaaacagaacagaaaaatgggaaactctaaaacgcagagcacccctcctcctccaaaggaacgcagttcctcaccagcaacggaacaaagctggatggagaatgactttgacgagctgagagaagaaggcttcagacaatcaaattactctgagctaygggaggacattcaaaccaaaggcaaagaagttgaaaactttgaaaaaaatttagaagaatgtataactagaataaccaatacacagaagtgcttaaaggagctgatggagctgaaaaccaaggcttgagaactacgtgaagaatgcagaagcctcaggagccgatgtgatcaacttgaagaaagggtatcagcaatggaa

SEQ ID NO: 897 - DNA, 401 bp, Homo sapiens
aaaattcaacaacccttcatgctaaaaactcttaataaattaggtattgggtctcttaaaaaaaaaattagcttggtgtggtgggtatgtgtctgtggccccagctatttgggaggccggggcgggaggatgacttgaattcaggagtttaaggttatagtgagccatgatcgtgccactggactccagcctgggtgacaragtgaggccctagctttaaaaaaaaaaaaaaaaaaaaaaaaaaaaaaaaaaaaaattgccggccatggtggccgcgggtggtggttggcgccgctgcgctgcggcccggggcagtgcggagccgggacagtcgcggcgctgacgcccgcgggccccagctgcagatatgaagcggagccgctgccgcgaccgaccgcagc

SEQ ID NO: 898 - DNA, 401 bp, Homo sapiens
acaaacactgcggaaggccgcagggtcctctgcctaggaaaaccagagacctttgttcacttgtttatctgctgaccttccctccactattgtcccatgaccctgccaaatccccctctgtgagaaacacccaagaattatcaataaaaaaataaatttaataaaaaaaaaagattaatacactcaatgttatataaataygtgtgctacttaaattttgcaccctaagaacttcacttgccttaacctagttctggtcctgctctgccacccctagcttagattacataggagcacaaaatagcttaatttaccaagagtgcatacattggggaagaaatagttcaccaaaaagaaattggaatacaattggtgaaaataggctgaatatatgatgtgtg

SEQ ID NO: 899 - DNA, 401 bp, Homo sapiens
tggaatagaacaatattgggaaaatcttatttgttttaaaacttcattcaaaactagtcccatgaaaaggcaaactgagtattatgttagctgtgggtttttcatatatagtttttacatggaggtggtttttttatttctggtttgttgtacatttttatcatgaaagggtattacattttgtaaaatgcttttttctgmatcaattaagatgatcatgtgggttttctccttcattctgttaatgttaatgttaaataattaatgttaattaattatgttaatattatgttaattaattctcatatgttgaaccatccttgcattctaggaataaattctacttggtcatggtgtataatcctttaaaaaaaaataaataaattaggtattgatgggac

SEQ ID NO: 900 - DNA, 401 bp, Homo sapiens
ctgctcaaggaaataaaagaggataaaacaaatggaagaacattccatgctcatgggtaggaagaatcaatatcgtgaaaatggccatactgcccaaggtaatttacagattcaatgccatccccataaagctaccaatgattttcctcacagaattggaaaaaactactttaaagttcatatggaaccaaaaaagagccygcatcgccaagtcaatcctaagccaaaagaacaaagctggaggcatcacactacctgacttcaaactatactacaaggctacagtaaccaaaacagcatggtgctggtaccaaaacagagatatagatcaatggaacagaacagagccatcagaaataacgcggcatatctacaactatctgatctttgacaaacctgag

SEQ ID NO: 901 - DNA, 401 bp, Homo sapiens
aaaactactttaaagttcatatggaaccaaaaaagagcccgcatcgccaagtcaatcctaagccaaaagaacaaagctggaggcatcacactacctgacttcaaactatactacaaggctacagtaaccaaaacagcatggtgctggtaccaaaacagagatatagatcaatggaacagaacagagccatcagaaataacrcggcatatctacaactatctgatctttgacaaacctgagaaaaacaagcaatggggaaaggattccctatttaataaatggtgctgggaaaactggctaaccatatgtagaaagctgaaactggatcccttccttacaccttatacaaaaatcaattcaagatggattaaagatttaaacgttagacctaaaaccataaa

SEQ ID NO: 902 - DNA, 401 bp, Homo sapiens
gctgggaaaactggctaaccatatgtagaaagctgaaactggatcccttccttacaccttatacaaaaatcaattcaagatggattaaagatttaaacgttagacctaaaaccataaaaaccctagaagaaaacctaggcattaccattaaggacataggcgtgggcaaggacttcatgtccaaaacaccaaaagcaatgrcaacaaaagacaaaattgacaaatgggatctaattaaactaaagagcttctgcacagcaaaagaaactaccatcagagtgaacaggcaacctacaaaatgggagaaaattttcacaacctactcatctgacaaagggctaatatccagaatctacaatgaactcaaacaaatttacaagaaaaaaacaaacaactccatc

SEQ ID NO: 903 - DNA, 401 bp, Homo sapiens
aaacaaatttacaagaaaaaaacaaacaactccatcaaaaagtgggcgaaggacatgaacagacacttctcaaaagaagacatttatgcagccaaaaaacatgaaaaaatgcttatcatcactggccatcagagaaatgcaaatcaaaaccacaatgagataccatctcacaccagttagaatggcaatcattaaaaagtsaggaaacaacaggtgctggagaggatgtggagaaataggaacacttttacactgttggtgggactgtaaactaattcaaccattgtggaagtcagtgtggcgattcctcagggatctagaactagaaataccatttgacccagccatcccattactgggtatatacccaaaggactataaatcatgctgctataaagaca

SEQ ID NO: 904 - DNA, 401 bp, Homo sapiens
cagttagaatggcaatcattaaaaagtgaggaaacaacaggtgctggagaggatgtggagaaataggaacacttttacactgttggtgggactgtaaactaattcaaccattgtggaagtcagtgtggcgattcctcagggatctagaactagaaataccatttgacccagccatcccattactgggtatatacccaaagkactataaatcatgctgctataaagacacatgcacacgtatgtttattgcggcattattcacaatagcaaagacttggaaccaacccaaatgtccaacaatgatagactggattaagaaaatgtggcacatatacaccatggaatactatgcagccataaaaaatgatgagttcatgtcctttgtagggacatggatgaaa

SEQ ID NO: 905 - DNA, 401 bp, Homo sapiens
attctcagtaaactatcgcaagaacaaaaaaccaaacactgcatattctcactcataggtgggaactgaacaatgagatcacatggacacatgaaggggaatatcacactctggggactgttgtggggtggggggaggggggagggatagcattgggagatatacctaatgctagatgatgagttagtgggtgcagcacascagcatggcacatgtatacatatgtaactaacctgcacaatgtgcacatgtaccctaaaacttaaagtataataaaaaaaaaagaaaaaaaaaagaaaaatgccttcaggaagagccaggacatgaacacatgttttcttaggatagacgccacaagtaaccatataagctgttgatgataattcaactaatgttttaaa

SEQ ID NO: 906 - DNA, 401 bp, Homo sapiens
tatcgcaagaacaaaaaaccaaacactgcatattctcactcataggtgggaactgaacaatgagatcacatggacacatgaaggggaatatcacactctggggactgttgtggggtggggggaggggggagggatagcattgggagatatacctaatgctagatgatgagttagtgggtgcagcacagcagcatggcacaygtatacatatgtaactaacctgcacaatgtgcacatgtaccctaaaacttaaagtataataaaaaaaaaagaaaaaaaaaagaaaaatgccttcaggaagagccaggacatgaacacatgttttcttaggatagacgccacaagtaaccatataagctgttgatgataattcaactaatgttttaaaaattggtaaaggc

SEQ ID NO: 907 - DNA, 401 bp, Homo sapiens
gacacatgaaggggaatatcacactctggggactgttgtggggtggggggaggggggagggatagcattgggagatatacctaatgctagatgatgagttagtgggtgcagcacagcagcatggcacatgtatacatatgtaactaacctgcacaatgtgcacatgtaccctaaaacttaaagtataataaaaaaaaaagraaaaaaaaagaaaaatgccttcaggaagagccaggacatgaacacatgttttcttaggatagacgccacaagtaaccatataagctgttgatgataattcaactaatgttttaaaaattggtaaaggctgagtatgggttaagataagattatggaatccctgcaagccacagagaaatgggagttcacactattcactg

SEQ ID NO: 908 - DNA, 401 bp, Homo sapiens
gcattgggagatatacctaatgctagatgatgagttagtgggtgcagcacagcagcatggcacatgtatacatatgtaactaacctgcacaatgtgcacatgtaccctaaaacttaaagtataataaaaaaaaaagaaaaaaaaaagaaaaatgccttcaggaagagccaggacatgaacacatgttttcttaggatagaygccacaagtaaccatataagctgttgatgataattcaactaatgttttaaaaattggtaaaggctgagtatgggttaagataagattatggaatccctgcaagccacagagaaatgggagttcacactattcactggctcttctcaatagactacaaatttcatcaggtgttcacaagaatgattggaggcagggtgaga

SEQ ID NO: 909 - DNA, 401 bp, Homo sapiens
cattgggagatatacctaatgctagatgatgagttagtgggtgcagcacagcagcatggcacatgtatacatatgtaactaacctgcacaatgtgcacatgtaccctaaaacttaaagtataataaaaaaaaaagaaaaaaaaaagaaaaatgccttcaggaagagccaggacatgaacacatgttttcttaggatagacrccacaagtaaccatataagctgttgatgataattcaactaatgttttaaaaattggtaaaggctgagtatgggttaagataagattatggaatccctgcaagccacagagaaatgggagttcacactattcactggctcttctcaatagactacaaatttcatcaggtgttcacaagaatgattggaggcagggtgagaa

SEQ ID NO: 910 - DNA, 401 bp, Homo sapiens
actggctcttctcaatagactacaaatttcatcaggtgttcacaagaatgattggaggcagggtgagaatccaagaaaaatttactcatggctcatatttcaaagagaaaaatagcagcctgtgtagcattggaataaagccatagattcttcaccctacctcttctatagcgcacatagcttaagcttgtaagaaaaagrcaataaacaatgttggccttgggacagtggtgaagatccactgcatctggagagaagaaataaacatagactctctatctctgaaagaaaggcaacaatacatgctaagctcagataaacagctctcttgcagtttaggaaagggcagtatcatggagaaggcaccactatcagggtattcaggaacacaatgcctatct

SEQ ID NO: 911 - DNA, 401 bp, Homo sapiens
atgaggacggatccctcatacatggcttagcactgtccccttggtgatgagtgagttcacacaagatctggttgtttaaaagggtgtggcacctcctccctctctctcttggtcctgctcttgtcatgtgacatgctggctccctgtcaccttctgccataactgtaagctccctgaggcttcaccagaagcagatgtcarcatcatgctttctgtaaagcctgaagaatcatgagtcaattaaacattttttttcttttttttttttgagacagagtctcacttggttgctcagactggagtacagtggtacgatctcgactcactgaaacctctgcttcctggcttcaagcatttctcctgcctcagcctcctgagtagctgagattacaggcgcccac

SEQ ID NO: 912 - DNA, 401 bp, Homo sapiens
gaggacggatccctcatacatggcttagcactgtccccttggtgatgagtgagttcacacaagatctggttgtttaaaagggtgtggcacctcctccctctctctcttggtcctgctcttgtcatgtgacatgctggctccctgtcaccttctgccataactgtaagctccctgaggcttcaccagaagcagatgtcagcrtcatgctttctgtaaagcctgaagaatcatgagtcaattaaacattttttttcttttttttttttgagacagagtctcacttggttgctcagactggagtacagtggtacgatctcgactcactgaaacctctgcttcctggcttcaagcatttctcctgcctcagcctcctgagtagctgagattacaggcgcccacca

SEQ ID NO: 913 - DNA, 401 bp, Homo sapiens
aaacattttttttcttttttttttttgagacagagtctcacttggttgctcagactggagtacagtggtacgatctcgactcactgaaacctctgcttcctggcttcaagcatttctcctgcctcagcctcctgagtagctgagattacaggcgcccaccaccaaaaaaaaaataacccagcctcaggtattctttacagyaatgtaagaatggtctaatacagaaaattggtactgaggagtggggcattgctataaagatacctgaaaatgtaggaccaactttggaactgggtaataggactgagataagaagagtttgaagaatgcagaagaaagtaggaagatgaggaaatgtttgaaacttcttagaggctagttaaatgattgagaccaaaatg

SEQ ID NO: 914 - DNA, 401 bp, Homo sapiens
ttttttttttttgagacagagtctcacttggttgctcagactggagtacagtggtacgatctcgactcactgaaacctctgcttcctggcttcaagcatttctcctgcctcagcctcctgagtagctgagattacaggcgcccaccaccaaaaaaaaaataacccagcctcaggtattctttacagtaatgtaagaatggwctaatacagaaaattggtactgaggagtggggcattgctataaagatacctgaaaatgtaggaccaactttggaactgggtaataggactgagataagaagagtttgaagaatgcagaagaaagtaggaagatgaggaaatgtttgaaacttcttagaggctagttaaatgattgagaccaaaatgctgaaagtgatatg

SEQ ID NO: 915 - DNA, 401 bp, Homo sapiens
ccagcctcaggtattctttacagtaatgtaagaatggtctaatacagaaaattggtactgaggagtggggcattgctataaagatacctgaaaatgtaggaccaactttggaactgggtaataggactgagataagaagagtttgaagaatgcagaagaaagtaggaagatgaggaaatgtttgaaacttcttagaggctrgttaaatgattgagaccaaaatgctgaaagtgatatggacagtgaggtccaggctgatgaggtctcagatggaaatgaggaacttattgagaactgggggaaaggtcacccttgttatgccttagcaaagaatttggctgcattgtgtttatgctgtagagatatttggaagcctgaacttaagagtgatgacttaggat

SEQ ID NO: 916 - DNA, 401 bp, Homo sapiens
ccaggctgatgaggtctcagatggaaatgaggaacttattgagaactgggggaaaggtcacccttgttatgccttagcaaagaatttggctgcattgtgtttatgctgtagagatatttggaagcctgaacttaagagtgatgacttaggatatgtgggagaagaaatttctaagcagcaaaacatttaagatgtgacccractgcttctaacagcttatactcagatgcaggagcaaaaaaaaatgacttaaaggtgggatttatatttaaaaagaaagccaagtataaaactttggaaaatatgtagctttgcaatgtagtagaaaaggaaagctcattttcaggggaagaatctaagcaggcggcagagtgcccacttgctggagagatcagcatgat

SEQ ID NO: 917 - DNA, 401 bp, Homo sapiens; identical to SEQ ID NO: 328

SEQ ID NO: 918 - DNA, 401 bp, Homo sapiens; identical to SEQ ID NO: 329

SEQ ID NO: 919 - DNA, 401 bp, Homo sapiens
cccaggtacagttcaggtcacagctctggaaagcacattctgtaagccttggtggcttccatgttgtattaaacctgcaggtatttagcacacaaaagtaaaagaggcttggcaacttctacctagatttcagaggatacatgagaaagcatgggtggccaggcagaagcctgtacaggagcagagcccccacagagagcstctgctagggtagtgccaaggaaagatgtgggattggagcctccacacaagtcctcactgagacaactgcttagtgaagctgtgggaatggggcctctaccttacagcccctaaaatggtagatacactagcagcttacatcctgagcctggaaaagccacaggcattcaactacaacccatgaaagcagcaacacgggc

SEQ ID NO: 920 - DNA, 401 bp, Homo sapiens; identical to SEQ ID NO: 330

SEQ ID NO: 921 - DNA, 401 bp, Homo sapiens
ttccattttaaaagggagtcaaattggccgaaataaaggggctacaggctccacacaagtctgaaatccagcagggctgtcattaaatcttaaagtttcaagataatcgcctttgattctttgccctgaatgaggggtgggctcctaaggccttgggcagccccactcctgtggcttccctgggcgaagcccgtgttgctrctttcatgggttgtagttgaatgcctgtggcttttccaggctcaggatgtaagctgctagtgtatctaccattttaggggctgtaaggtagaggccccattcccacagcttcactaagcagttgtctcagtgaggacttgtgtggaggctccaatcccacatctttccttggcactaccctagcagaggctctctgtggg

SEQ ID NO: 922 - DNA, 401 bp, Homo sapiens
ccacagagagcctctgctagggtagtgccaaggaaagatgtgggattggagcctccacacaagtcctcactgagacaactgcttagtgaagctgtgggaatggggcctctaccttacagcccctaaaatggtagatacactagcagcttacatcctgagcctggaaaagccacaggcattcaactacaacccatgaaagcrgcaacacgggcttcgcccagggaagccacaggagtggggctgcccaaggccttaggagcccacccctcattcagggcaaagaatcaaaggcgattatcttgaaactttaagatttaatgacagccctgctggatttcagacttgtgtggagcctgtagcccctttatttcggccaatttgactcccttttaaaatggaaa

SEQ ID NO: 923 - DNA, 401 bp, Homo sapiens; identical to SEQ ID NO: 331

SEQ ID NO: 924 - DNA, 401 bp, Homo sapiens
tcaaaggcgattatcttgaaactttaagatttaatgacagccctgctggatttcagacttgtgtggagcctgtagcccctttatttcggccaatttgactcccttttaaaatggaaatgtttaatcagtgcctgtatctccattgtatcttggaagtaaataatttattttgattttacaggctcataggtggaaggatawgtctcagatgagacttaggacttgatgttggaaagagctaagactttgggggaccttgggaaaagatgattgtattttgccatgtgagaagtacatgagatttgggggccagagggagaatgatatggtttggatgtttgtcccctccaaatctaatgttgaaatctaatcctcagttttggaggtggaatctggtggga

SEQ ID NO: 925 - DNA, 401 bp, Homo sapiens
gctaagactttgggggaccttgggaaaagatgattgtattttgccatgtgagaagtacatgagatttgggggccagagggagaatgatatggtttggatgtttgtcccctccaaatctaatgttgaaatctaatcctcagttttggaggtggaatctggtgggaggttcctgaatcatcatgggagcagatccctcatgartggcttagtgccattcccttcataatgagtgagttcacatgagatctggttgtttaaaagagtgtggtatcgccctccactctttctcttgctcactctcactatgtgacatattggctgcctgtcatcatctgccataattgtatgcttcctgtgacctcaccagaaacagacaccagcaagttgcttcctataaaacc

SEQ ID NO: 926 - DNA, 401 bp, Homo sapiens
cagtaataaatcccaaactgagcttaatttctgacttaaatgactcaaaccaaagactatcttcccccaaaatcctggcaaaattcacagtatacccaattgattcataaaaattacatatatcagtcttgtcatataaaaatattatgaggtatacaaaaaataagacacaaagaaataaaacatattgtcaagggacarcgcgatcaatggaaccagactcagaaatgaaatagatgttgaaaacgtcagggaatttaaaacagctgattaagatattaaagactctagtgaaaaagatacataaattgcatgatcaggtgaattagcagagagatcaaaattttaagaaagaattaattgcaaatgttagaaatgaataaaactgtaacagagatgaa

SEQ ID NO: 927 - DNA, 401 bp, Homo sapiens
agtaataaatcccaaactgagcttaatttctgacttaaatgactcaaaccaaagactatcttcccccaaaatcctggcaaaattcacagtatacccaattgattcataaaaattacatatatcagtcttgtcatataaaaatattatgaggtatacaaaaaataagacacaaagaaataaaacatattgtcaagggacaaygcgatcaatggaaccagactcagaaatgaaatagatgttgaaaacgtcagggaatttaaaacagctgattaagatattaaagactctagtgaaaaagatacataaattgcatgatcaggtgaattagcagagagatcaaaattttaagaaagaattaattgcaaatgttagaaatgaataaaactgtaacagagatgaag

SEQ ID NO: 928 - DNA, 401 bp, Homo sapiens
aataaatcccaaactgagcttaatttctgacttaaatgactcaaaccaaagactatcttcccccaaaatcctggcaaaattcacagtatacccaattgattcataaaaattacatatatcagtcttgtcatataaaaatattatgaggtatacaaaaaataagacacaaagaaataaaacatattgtcaagggacaacgcratcaatggaaccagactcagaaatgaaatagatgttgaaaacgtcagggaatttaaaacagctgattaagatattaaagactctagtgaaaaagatacataaattgcatgatcaggtgaattagcagagagatcaaaattttaagaaagaattaattgcaaatgttagaaatgaataaaactgtaacagagatgaagcat

SEQ ID NO: 929 - DNA, 401 bp, Homo sapiens
catccaagagctattcaaaatatcaaactatttaacattcagtacatgtctttggaattccagagaagagacagaataggacaaaagaaatctttgaagagataatggctgaaaattttctaaaattaatgaaagacattaaatcacatatccagaaagcccagagaatatgaaacaggataaacacacacacatacgcgygcacacacacacacacacacacacacaccactatatatattatatttgaactgctgtagaacaaaggcagaaataaaatctttaaggcagcaaagctaaaaaaaaaagacatattatgtcaataaaaacaaagacttttgtcagaagctatacaagccagaagataatggagtaacatctttaaagtctcgagaggaaga

SEQ ID NO: 930 - DNA, 401 bp, Homo sapiens
ttattcaaaaaggttattcaaaaatctacagtaaaataatagcaatatgtatattctttgtatagcatgtataaaagtaaaatgactgacagtagcacaaatgttgggaggaagggagcgggagtcactctcgtttaaggtacttaaactacacctgaagtggtatcattttatttctttttctttttatttgaaacagawtctcatctgttgctcactcggagagtgcagtggcatgatcatagctcactgcagccttgaactcctaggctcaagtaatcctcccacctcagcctcccaagtagctgggactggaggcatgtgccaccacacctggctaatttttatttagttagttacttttagagatgagttctcattgtgttgcacaggctggtctg

SEQ ID NO: 931 - DNA, 401 bp, Homo sapiens
ctagcaaaatagcagatattaatcaaagtatatcatataattagagtaaccataatcaaaacacacataggtgtattaaaagatggagattatcagactggataaaaaagcaagatgcaatgttatgttttccatgtcttcagatagaaagacatactaaggtttaaagtagaagcatgagaaaagatataacattcacakactaattttaaaaatttaagtaacaatactgcatcagactaagtaggcttcgaaatagagaacattgccagggataaagaggggaattacataaaggggtttcttccccaagaagacataacaatcctaaatgtttaatcacctaacaatagagctttcaaatatgtgaaataaaaactgatagaactgaaaggagaaat

SEQ ID NO: 932 - DNA, 401 bp, Homo sapiens
ggataaaaaagcaagatgcaatgttatgttttccatgtcttcagatagaaagacatactaaggtttaaagtagaagcatgagaaaagatataacattcacagactaattttaaaaatttaagtaacaatactgcatcagactaagtaggcttcgaaatagagaacattgccagggataaagaggggaattacataaagggrtttcttccccaagaagacataacaatcctaaatgtttaatcacctaacaatagagctttcaaatatgtgaaataaaaactgatagaactgaaaggagaaatagacaaatctacaactaaagttgaagtcctcaacacttgtctctcagtaattgatagaacaaatattaagaaagtcaataaacatacagaaaagctaaa

SEQ ID NO: 933 - DNA, 401 bp, Homo sapiens
agcaagatgcaatgttatgttttccatgtcttcagatagaaagacatactaaggtttaaagtagaagcatgagaaaagatataacattcacagactaattttaaaaatttaagtaacaatactgcatcagactaagtaggcttcgaaatagagaacattgccagggataaagaggggaattacataaaggggtttcttccscaagaagacataacaatcctaaatgtttaatcacctaacaatagagctttcaaatatgtgaaataaaaactgatagaactgaaaggagaaatagacaaatctacaactaaagttgaagtcctcaacacttgtctctcagtaattgatagaacaaatattaagaaagtcaataaacatacagaaaagctaaacaacaccat

SEQ ID NO: 934 - DNA, 401 bp, Homo sapiens
aagtagaagcatgagaaaagatataacattcacagactaattttaaaaatttaagtaacaatactgcatcagactaagtaggcttcgaaatagagaacattgccagggataaagaggggaattacataaaggggtttcttccccaagaagacataacaatcctaaatgtttaatcacctaacaatagagctttcaaatatrtgaaataaaaactgatagaactgaaaggagaaatagacaaatctacaactaaagttgaagtcctcaacacttgtctctcagtaattgatagaacaaatattaagaaagtcaataaacatacagaaaagctaaacaacaccatcagcaaagttgacccaatcgacccttacagagcaatccacccagcaacagtagaatac

SEQ ID NO: 935 - DNA, 401 bp, Homo sapiens
aaatagagaacattgccagggataaagaggggaattacataaaggggtttcttccccaagaagacataacaatcctaaatgtttaatcacctaacaatagagctttcaaatatgtgaaataaaaactgatagaactgaaaggagaaatagacaaatctacaactaaagttgaagtcctcaacacttgtctctcagtaattkatagaacaaatattaagaaagtcaataaacatacagaaaagctaaacaacaccatcagcaaagttgacccaatcgacccttacagagcaatccacccagcaacagtagaatacacattcttttcaatgtgcatggcaaatttaccaagacagaccaaattctaggccatcaaaagattttatttgcttttgaaatacgtg

SEQ ID NO: 936 - DNA, 401 bp, Homo sapiens
tggtggtgtgtgcctgtagtcccagctactcgggaggctgaggcagaagaattgcttgaacccgggaggtggaggttgcagtgagccgagattgtgccactgcactccagcctgggcgacagagcgagactccatctcaaaaaacaaacaaacaaaacaaacaaacaaacaaaaaaacccaaaagaaccttaaaaaaaaamccccgattgttttagggaatgaagaccattcttgtgtggtctttttatctagttaaatgcctattttccttaactattagtacagggtaaaataagggcggcttagcaaattaattatgattaacaaataaatacagggataattcactggacaattgttagaagaataattagaagttggatggaacagtggacggtgc

SEQ ID NO: 937 - DNA, 401 bp, Homo sapiens
acaagcagtcatttgcaggaaaggaaggaagggagggagaaatggaggggagggctataggattttttttttccttcttaaacaatttccttattgtttcctcctgtttatgcaaatgctcaaaattagcaatgaccactatcctttcaaatgaccctgctctagataaagttgtatagatcaggctttgagctgctgctstctgtctgttcttaggcaaacttcaggcgccggcctcccaagcatgaaaccccaatcccaagataatgcgtggaatacttaatcctcctttgtccttggctttccagtgtgggaatccagcaagatggagcaccgagccatctcctagatttcccattttaggacaggtcttggaatagtttatgatgtaactgtttcta

SEQ ID NO: 938 - DNA, 401 bp, Homo sapiens
tcatccctaactttccaagcatcccctcatccccaaagcagctttatatctcttcaagctctcccaatttttcagctttgacccttatgtgatgtccttaaactaaatgtttctcgaaacccctggctctagtttttcagtcacggcctctttctagcttcagtgccccaccctaccattcaatcaaaagccgccatcccrttctactccaaccttccttctcagattgcagttcacttctttcagtgagtcaacctgctgccttggatcttcctctcccttactcattccactcatttcatgccaatgtcttgagccaacacaatgaaaaactggtccccaagcccaagatccattcctgtctgctcttcctgaacacattcatgagcaatgctttctct

SEQ ID NO: 939 - DNA, 401 bp, Homo sapiens
cgccatcccgttctactccaaccttccttctcagattgcagttcacttctttcagtgagtcaacctgctgccttggatcttcctctcccttactcattccactcatttcatgccaatgtcttgagccaacacaatgaaaaactggtccccaagcccaagatccattcctgtctgctcttcctgaacacattcatgagcaaygctttctctcttaggccatgatcgtttctatagtttgctcctgtgttttttttttctttccattaatttccctttataaataaatgtatttaagcaaaaaagaagtaaaatgacttaataaaagtatatttactaaatactaaataacagtgaaagtgatacgtggatgtggtcaaaatttggatgactaaatgaatgac

SEQ ID NO: 940 - DNA, 401 bp, Homo sapiens
gccatcccgttctactccaaccttccttctcagattgcagttcacttctttcagtgagtcaacctgctgccttggatcttcctctcccttactcattccactcatttcatgccaatgtcttgagccaacacaatgaaaaactggtccccaagcccaagatccattcctgtctgctcttcctgaacacattcatgagcaatrctttctctcttaggccatgatcgtttctatagtttgctcctgtgttttttttttctttccattaatttccctttataaataaatgtatttaagcaaaaaagaagtaaaatgacttaataaaagtatatttactaaatactaaataacagtgaaagtgatacgtggatgtggtcaaaatttggatgactaaatgaatgaca

SEQ ID NO: 941 - DNA, 401 bp, Homo sapiens
tttttgtaatgtaaaattaagtcaaaatatacattttgaaaagttctatttatgatttttccctgacactgtcattcaggtctctattctccaactgtgacactggagaattcttctccatggagactatccgtctcaggaggaaaacaaacatgcagatactatcacaataaaatggcagatcctcttctcatcactctrtggtgaggtcaaccagttgacagcctcagtcacatacacagcacctctaattaactttccagtgctccattctagttattagtggagtgccaaaaatcgtaaaataattgaggaaaatcttgaatatataaaacagagaacaaggtaagcatttacaaaataaaaatatccttggaattgttgtgaaagcaaatattaaa

SEQ ID NO: 942 - DNA, 401 bp, Homo sapiens
aaataaaaatatccttggaattgttgtgaaagcaaatattaaagtgtcaagaaaaagggaggataattggaatactgcgttgaagaactcttcagaaatttgaaaaaataaaagttgatgagatagacaatactggagaaaggtaagaaaattagacaatcctctgggggtctaatatctaacaaatattagttccaggaraaaaaaatgacagattagatgggaggaaattatctaggaatttttaaaaaatatgcacagaaccaacatatatgggtttctagactaaagggatttaacaagtttcctacgtcatgaaagaagaaagatccacatcatggggcatcatgacaaaatttaaaactccaagaataaaaagatactaagcgatgcaatagaat

SEQ ID NO: 943 - DNA, 401 bp, Homo sapiens
ctttctgggtaactttggacattggcccaatcctgtagagcctcagttttctcatttgtgaggtgggaatcatcatgggtactatgtaagtttgtcttagggaggggggctatgcatgaaaactattgctctaagttctccataaagaaaaaagtggctatgttctgtcctactctgtctaggccttctcaggccttcaamcattgcccatgcccacagcccagtcatcatcatccacttagttgcaatgtgactccacgcatgtcctggccaattcagtaacctctacacaatgcagcaagatggcactggcagtatggcacctagatcctgggtgttggagccaggcaacatggcttgctaaaggcaatgtacagtaggcaggatttgaagacaactgc

SEQ ID NO: 944 - DNA, 401 bp, Homo sapiens
aagtgggcccctctttaaaactctgagaaaatacgagattgactgggttttccatctcatcatgtcagttctatcataagactttttattatgttttatttttactgaataaaatttcatacccttagtaaggacagaaggatgcttgtggcttggtttctacctagttctccagttttgtctcctgtatttccttttttycttattcaatgaaccaatattgattaactgcctagtgggctagagatataaagacaagcaagacagtcacctgagtgttcctcttagctgtgcctttcttgatacaccatacctgtggttcccagaatatgcagcttgttgtagacttgtctgcccttgcgtgtgcctccctgctgtactcctctcacttctccattccc

SEQ ID NO: 945 - DNA, 401 bp, Homo sapiens
acatttctataagtgacttctactggccttcaaactcatctcatgccatgctctccactcaatccataccggcctccttcatttctctaatgcgccaagttcttcatggcctcagatcgcctacacatgctgcttccctggactggacagttcttcccccgcattgcacttactctaactcacctttcaggtctcagcttraatgtcacttcttcagaaagtccttcagtgactacctagtcttatgcaagtccccactgttatagcttccatgacaccttttgcttaattcacagtacttaccacgattttaattcatttttgtgtttttcattcgtctatttattccacgaatatttattaagcacatatcatgtgccatgcacaactctaaaggtggg

SEQ ID NO: 946 - DNA, 401 bp, Homo sapiens
tttttaggttttttgcctgggaagcagggtgtattgtggtactcaaattaggcagagaagtctgtggagagggagattcctttggaagacttcaggggttgggatcattgtcattattgtggccatgtgaaatgtgctatgccctttagattccaagtgaagatatctactgggtagttacatgaatgtatttaacttagwatatgagtttttgctggagatgtaaatctgaaagtcaccagtacatatagaaggtatctcaagctgtgaactacatgagatcataaggtaaaaggggacagagaaaagaaagggattaggacaaagccttgggatactttgacatatagacatctattcaatttgggaagagccagtatgggcattgagaaggagcagcc

SEQ ID NO: 947 - DNA, 401 bp, Homo sapiens
agcagccagaaaaatatgagaaaaaccaagagattgttatagcagagaaattgagctatagctagaagatgaccttaccaggcaggattctagtaaaagttagaaggcacagtcaaattaagataattctgggaaggtttattcattaaagtactgtgtatgaagatatgtgcagggcacgggcaaccttaagagatggcmttgtaactctgtgctttgagtgcagtttctaggggagtaaatactctgatgctattctcctctcttcctccaatctcctgcagaggtgcttatttagcaaattcaaccttaaacctgagtgcatggaaactattgatgcagtgtccaaggtggagaaaggtcagagtggatccagaggagccaagagaagacgtccagca

SEQ ID NO: 948 - DNA, 401 bp, Homo sapiens
actggggaaaagggggatagttgtaagaatgaggtattttaaagtgttagaagaatgagatccaaagagcaagaactggcttgtcttagagaggagtagagacagatcttcaattatcatgggaaggaatgtacagatggagctaggggcatagaatcagtggagggaattgaagataatgtctatttcatctaatttttyagtaaagtatgaaaataaaacatcagctcacggggagaggtcctggagacttaaggagagagaagatatgcaatgattatctcagaaaatggaaaagtaaatctgctatagaaatgttagattaactgatatctgagttagattatctggtaaccaagtgcacgtgcaaagtgagtcctgcgagtaatattgtgatattt

SEQ ID NO: 949 - DNA, 401 bp, Homo sapiens
ttaaggagagagaagatatgcaatgattatctcagaaaatggaaaagtaaatctgctatagaaatgttagattaactgatatctgagttagattatctggtaaccaagtgcacgtgcaaagtgagtcctgcgagtaatattgtgatatttcaacttctcaggagcaagctcagactaagtgattgtttggatttatccagyatttatctagtcaagaatggcaaaaggagagaaaggaaagaaagataagtggtttttcaaggcactgatcttaatgatgggtcataaattataagctggaaggtgagagaagtgaagatgagaagggaaacatacatacagacaaagctgtagaagggtgagtggatttgagataatgatgtcagtctccagagggaaga

SEQ ID NO: 950 - DNA, 401 bp, Homo sapiens
caggagcaagctcagactaagtgattgtttggatttatccagtatttatctagtcaagaatggcaaaaggagagaaaggaaagaaagataagtggtttttcaaggcactgatcttaatgatgggtcataaattataagctggaaggtgagagaagtgaagatgagaagggaaacatacatacagacaaagctgtagaaggktgagtggatttgagataatgatgtcagtctccagagggaagatgccagaatgaataagctactaggacagaagagtactgtatgcaagtggaatgtactgaaatcaagattttgaagatgatgcaattgctggagatgacaaatcctagggcatgactatgtgagtaggtggcagaggtgggtggaggaagaaatggtca

SEQ ID NO: 951 - DNA, 401 bp, Homo sapiens
tggacaccaccactcctactcagccagttccttatatgcttggctctttcttaatcactcaaacctctgctcaaatgtttccttttcagagatgacttgcttggcttcttatcttcagcatcacaccgctgtgtacctcatcatcatattttatttcttttagagcacttatcaacaatcacttgtgtatttgtttgtgcrtgtgtacactactggtttcttgtacattttctgtctgtctgcactagaatgcctgtgaaggcagaagcataatctgtctgccttatcttcatgtcctgacacttaaaatggtaaatgcagtaaacattcattgaaaaactgttgaaaaaatattttgtttaaatatcttccaggttttcaagcacaacaaccattgtata

SEQ ID NO: 952 - DNA, 401 bp, Homo sapiens
ccaccactcctactcagccagttccttatatgcttggctctttcttaatcactcaaacctctgctcaaatgtttccttttcagagatgacttgcttggcttcttatcttcagcatcacaccgctgtgtacctcatcatcatattttatttcttttagagcacttatcaacaatcacttgtgtatttgtttgtgcgtgtgtrcactactggtttcttgtacattttctgtctgtctgcactagaatgcctgtgaaggcagaagcataatctgtctgccttatcttcatgtcctgacacttaaaatggtaaatgcagtaaacattcattgaaaaactgttgaaaaaatattttgtttaaatatcttccaggttttcaagcacaacaaccattgtatatttaaa

SEQ ID NO: 953 - DNA, 401 bp, Homo sapiens
acgcagatattctgagtagggggtttgggggagaaataagagtgattcctcctatctgctgctagggccataaagacactacaccaagaggaagtgtaggcttggccaggtccctgttccaggccctgttgaaaaggctgttagctctctctccttcacaccttcagactctatacacagacaatattctctgtgccttgrtgtgtagtattctagaataatggcttctattcagtaggggtttgacacagacatttttcatgttatagctcatacagaaaatttagttttcatagaaatctatagcccaacacacggataggtaaatgtttctgtaaaggccagatggtaaatatttttggctgtgtgaattacatagtttctgtcacagctgctcaact

SEQ ID NO: 954 - DNA, 401 bp, Homo sapiens
ttccaggccctgttgaaaaggctgttagctctctctccttcacaccttcagactctatacacagacaatattctctgtgccttggtgtgtagtattctagaataatggcttctattcagtaggggtttgacacagacatttttcatgttatagctcatacagaaaatttagttttcatagaaatctatagcccaacacacrgataggtaaatgtttctgtaaaggccagatggtaaatatttttggctgtgtgaattacatagtttctgtcacagctgctcaactctgccattatagctaaacagaagccatagacaatgtggccaaggacaaggatggtgaagtttccataaaatttgatttacaaaaataggctatgggatggatttggcccactaact

SEQ ID NO: 955 - DNA, 401 bp, Homo sapiens
cctatcatatcatactgattatgttatactgactagcacagttctgggcacacattaatcacttcacagaaaacgtgctgactttaatatcatagtaggggatttgggttgtaacggagatggagaactttgtatatatgacttttccatctttacaatcttctttcactttgtagatgcattaaaaattgcctggctaaytgatgtgagtaatatgtcattgagcccaaggccatggggaatactaaagcaacctgtttaaatcccaaatctcaaatgactttgaaaaaaattgtggactaaaagcaggaaatcatcccaagaccttgtcttaacctaaattccccctaaaaagtaagacctgggatagagactttcagagagtttattttggagaagta

SEQ ID NO: 956 - DNA, 401 bp, Homo sapiens
gcctggctaactgatgtgagtaatatgtcattgagcccaaggccatggggaatactaaagcaacctgtttaaatcccaaatctcaaatgactttgaaaaaaattgtggactaaaagcaggaaatcatcccaagaccttgtcttaacctaaattccccctaaaaagtaagacctgggatagagactttcagagagtttattytggagaagtaacttcaagaaatggggggtgggagttgtggagaatgaaacagggaatggacaggtgcactatggagctaacaccactgtgagcatctggggctcagtcccacttacagaccctctgagaagccttgtagaatgctctgtagaattgctacctaggggatagaagaggggattacttatccaccacttcac

SEQ ID NO: 957 - DNA, 401 bp, Homo sapiens
taaagaatgagctttaaaatcctatccatttttggggggaaatatttctgcaagaagtctcttactttcttaagcagagtatttcaaactgttttatcatgaattgacaatctataattgtataaatttatggggtacaacatgatgttataatttatgagtgtgatgtggaataactatatcaagctaattaatattttyattacctcaaatacttaacattttttgtagtgagaacatttgaaatgcactcttagcaaatttgaaatgtacaattctctattattaactatgttcaacacacggtccaatagaactcaaaaaagaataaatcacatcattcatgtctcacagattttataccctttaatcattaattctccattcccccagcctctgta

SEQ ID NO: 958 - DNA, 401 bp, Homo sapiens
tcttctacttttaagaggttttgtgattacatcggacccacctggctaatccaagaacaccacctcatctcgtgttcaactgattagcaacattaattccatctgcaactttaatgcctctctggcatggaccctaacatatttacaggttccaggaattaggacatgggtatctttgtggatcattattaattagacagkgatatatcctaatgcaaaaattttaaaaattatttacccttgcacattttcaggttgacatctagcatttttcactacagttgcaaaggatgtcatttcttgcattttgcaaatctcaatatttacatcactcttaaaaatatctaaatgaatttaaatgtgatggcaatttgatatagttattatccatttaatttgtt

SEQ ID NO: 959 - DNA, 401 bp, Homo sapiens
ttgtgatatcttattctgagtaaatattcattttcacaactaattctgtatttataattggtatgccttttaaaagggaaactctattaagaagtttaaaatataactcaataaatcattgtcaagccaaattgaatggaattcacattcacttctttttcttttctttctttctttttttttttttttttttttgagacrgagtcttacactgttgcctggcctggagtgcaatggcacaatctcagctgggctcactaaaacccccgcctcctggttcatgcgattctcctgcctcagcctgctgagtagctgggattacaggcacacactgccatgcccggctaatgtttttttttttttgcatttttagtagagacaggggtttcactatgttggcc

SEQ ID NO: 960 - DNA, 401 bp, Homo sapiens
attctcctgcctcagcctgctgagtagctgggattacaggcacacactgccatgcccggctaatgtttttttttttttgcatttttagtagagacaggggtttcactatgttggccaggctggtctccaactcttgaccttgtgatctgcctccctcagcctcccaaagtgctaggattacaggtgtgagctaccgtgccyggccatggaattcatttaatcaaatgaaaaacaattactattaactgactcctggtgtatgtcagccactctgtttagactgtttggaaatggtgttttatttacttctcaaaaaacaagtgaccaagtacaagcatgcagaaccttatatgtatcattgttcatatttcactgccaaggaaaaattaagtagaatattc

SEQ ID NO: 961 - DNA, 401 bp, Homo sapiens
tctccaaacccaccctcctataccctgcttggactttgaaaactgccctagtcctgagctgcttggccccctgttctgttctgccaaactggaaggcaagagtccagaatgaaaaaataacttgtttttggctgggcactgtggctcatacctgcaatcccagcatggggtgggtggataacctgaggtcagaagttcaakaccagcctggccaacatggcaaaaccccatctctactaaaaatacaaaattagccgggcatggtgacagatgcctgtaatcccagctattctggaggctaaagcaggagaatcgcttgaacccgggaggcagagcttgcagtgagctgatgtcatgcgactgcactccagcttgggtgacagagtgagaccccatctcaa

SEQ ID NO: 962 - DNA, 401 bp, Homo sapiens
ggatggggaagagttgtgttcaggaaggagttaggggtcctgcactcaagctaatgaaggacaatagggcaaagttctgagcccctccctaggcccatggtgggacagtttatcctcattttgaatctgtatctagatgcctccttgcttacagccttcctctgtcaaagggtagtgcttgagccacaggagatgcttccrcttcattttcattttgtttccttccttctctttcttttcctgatgcactttatggaatccattgtccttgtcatctctactcatcgccttaatttatttataaaggtacccactaagaagggcctccttctcatcctttccccttttctatcctttggtcctatccctccatgtgcctgtgttagctgcaggggaaaata

SEQ ID NO: 963 - DNA, 401 bp, Homo sapiens
cattttgtttccttccttctctttcttttcctgatgcactttatggaatccattgtccttgtcatctctactcatcgccttaatttatttataaaggtacccactaagaagggcctccttctcatcctttccccttttctatcctttggtcctatccctccatgtgcctgtgttagctgcaggggaaaataaataaacctkcccacattatgtacatagggaattaaaattcaacatcttttctttttacctatgacaaaacactttaattatactgaagcaaggtgagtgctgaaggcaaaaccatatcgacagaaaccagagcaaacacactcttttcccaagctagacagagtaggaaacagctttccataaagcaagggcatggggatggaagacag

SEQ ID NO: 964 - DNA, 401 bp, Homo sapiens
ttataaaggtacccactaagaagggcctccttctcatcctttccccttttctatcctttggtcctatccctccatgtgcctgtgttagctgcaggggaaaataaataaacctgcccacattatgtacatagggaattaaaattcaacatcttttctttttacctatgacaaaacactttaattatactgaagcaaggtgartgctgaaggcaaaaccatatcgacagaaaccagagcaaacacactcttttcccaagctagacagagtaggaaacagctttccataaagcaagggcatggggatggaagacagcaagacccaagtcctaaagctagtatcaccacctccttccaaatctgtgacttggtacaaataaccatcttgtctctcagaaaagctt

SEQ ID NO: 965 - DNA, 401 bp, Homo sapiens
gttctatcatgaagttcattggtttgtctggggctaaatttaaatacataaaatgatatctgtgaaaccacctttgcaaagattatggcagtgaaagaaatctaacatggctgactccattttacttctagcctaacaggctagttgttctcactcgttcctgggcataggacaagctaaccatgggagcaatttagtttrtagtttaacttggaagcaaggataataatagttcttccctaaaactaaccccctccttgttcaggaaccaaaaacgaataaaaagccgtgaaattagaattatgagaggaacctgaattctgctaagattcagaataggcatagtttctattaatcctgctcaggagtcatgtggccagaggtcacaagatttccaactt

SEQ ID NO: 966 - DNA, 401 bp, Homo sapiens
tagtttgtagtttaacttggaagcaaggataataatagttcttccctaaaactaaccccctccttgttcaggaaccaaaaacgaataaaaagccgtgaaattagaattatgagaggaacctgaattctgctaagattcagaataggcatagtttctattaatcctgctcaggagtcatgtggccagaggtcacaagatttscaacttccccaattgctcctgtagataacattgttcttgtagaacctaagattgttcttttgagatgtttttccgacttttggattctggtaactgactgaccccattcagacctgtgactcatgacttaagtagtcctgtggccccctccttgaggcagacttagtgcacaaggaccgttttccacacccctatgattt

SEQ ID NO: 967 - DNA, 401 bp, Homo sapiens
tctatagagcagaaagaatagtattatctctctctctttagactttaatgaagattatgtgaaatggaacatgtaaattgtttatatcatgtagtgcttaatgttagttgttaaatgtaagcccaataattagtactattgtcattccttgtacttatatttggcatcacgctatctatctcaccttatttttctaagttrgaaaagcaggtattaaattattacctccattttgcagataaggaaattgaggcttagaaatgtttcatgactccacagtttaaaaagtgatggatataagtagaaattattgcataagaaggatttagagtcatctaaagttgtagaataaactagggcagttacttcaggttcagtccatgccaaatttgagtcttaaa

SEQ ID NO: 968 - DNA, 401 bp, Homo sapiens
tggaatcatgtagtatttgttcttctgtgcctggcttatgtcacttagcctaatgtctcccaggttcatttgtgcccgtgttggcacaaatggcaggatttttttctttttaagactaaacaacattccattttgtatatataccatgttttctttatccattcatctgttgatggacatttgtgttgtttccatatcttygctattgtgaataatgcttcgatgaacatgggagtgcagagataaatgaaggcttcaatgcacaaatagaaacaatgggtaaatgtagagccgcactcgggagacaagcctattttaagctgagaagaagattatattcccatcagcttactctttcctagagctatctgttgttctctaaaaggcagagcattggatgg

SEQ ID NO: 969 - DNA, 401 bp, Homo sapiens
caggtagtttcaaaagtcttgataccaatatcattctttgttcctcgtgttttttgtttgcttatgtgtttattccaatgacatgactgcttttggcctctgattttctctcccaaaaagtaacagaactgaagcaggtaatcaatatgatgcacgttagtagggaaaaaaaagtacttggagaggagtccgctgacccayggtccagtttggcttcttctcctttctacctcgaagccattcacaaattccttattctctctgggatctttatattgcaagggattggcttatttgactccaaacttccttctgtctcaacaaccctatagcccaatgtttagtgtggagcaaacctaagttcaaatcctttaacaagttactgtattccctctgagttc

SEQ ID NO: 970 - DNA, 401 bp, Homo sapiens
aaagggcgttgcagcagccatttatttatgaggttctgcactttggatggagatgcatatgtaatggggagagactgcacatttgacaaatgggaatcatgattgtctgacctactgacagttgttgatgtgctctcgtgacctgtaaatgttgcagctgactgattacagtaattgattgagaaaacatttgtcaatagycttctaatgacagagagcagggaggaagagattgctggagcacctaggagctgggttttgcttaacagaaggagcactgacccatgttatagacaatcgcagaatttcatatccccatctataaaatgaaaacacaatacttctcaccaacacttatacagcacctactatgtgctaggttagagatcataaactggtga

SEQ ID NO: 971 - DNA, 401 bp, Homo sapiens
gacaaacacacacacagaaaagaatgatttcaggcccttccttgagcatactcatgatgctataactttttatgacagtaaatagtaagtatctagcaaataaggaaaaataggctttcttgtttattaaagactgcacagtgaagtcagcccacatctatcgatatggctgccatatgcaacaaactattttaaaaccckttacaataccctgactttggtggtagctggaattgtagataaaggaagactgcatttgtaagtagtggacttgggcagggttttcagtagtgtcacctgattgctggtgacctataatgagtccttcacttccttggaaatcttattcctccagagccaacagagtaggaggttgaaaagtgttctataaactataatgc

SEQ ID NO: 972 - DNA, 401 bp, Homo sapiens
aaataggctttcttgtttattaaagactgcacagtgaagtcagcccacatctatcgatatggctgccatatgcaacaaactattttaaaacccgttacaataccctgactttggtggtagctggaattgtagataaaggaagactgcatttgtaagtagtggacttgggcagggttttcagtagtgtcacctgattgctgrtgacctataatgagtccttcacttccttggaaatcttattcctccagagccaacagagtaggaggttgaaaagtgttctataaactataatgctctataccaggggcagtgatctatggccactagtttttgcaaataaagttttattggaatacagctacacccattcagaatataaactccagagcagttattttcaa

SEQ ID NO: 973 - DNA, 401 bp, Homo sapiens
cacttggttcataaatgcctgggccttgctactactacagattctaaggctccactgcagacttcctgaaacagaatcttacggtgggagaagaatgccagactctgttttaacaagaaccccagattattttgatgagtcctaaaatttgagagcttctaccctagggatagccccctctttctgtactatttggcacayacaaatttggaaggagacaggaaattcgtgtccaacacaatgcgtgagaggcatgatgagagctagcagcatgaattatgaatctcctcttgtcagagaaaacccttcaggcaagagagacctaagctggcttttaatggagtcgagataacctggttaaccccaagagttcctcctctggacagctgcctcatgaggga

SEQ ID NO: 974 - DNA, 401 bp, Homo sapiens
cgtatctcaaggtgctcacacttttaataggaattagatttgtaaacaactaattataatgcaatatatgtgaataaagtattaacataagtaaaaatagtgtagcgaacacttaaatgacaaatcaattactcctgatttttaagtaatatttctaatttatagtcacaaaataagttagtatggtaagtgggtggatgrgtaagaaggaagatcttttccatatactggaaggctttgtatatagggagcttttaaatgattctgatactgacatcactattccagagcaatttaaggcatactctctgagggacaggacccaggctttagtattttagaagctccagaggtgattctaattttcagccagggttgccaatcaccttttatagttgcca

SEQ ID NO: 975 - DNA, 401 bp, Homo sapiens
tctcccttagagacagggagatacatacaaagttatcacacatcaggagccaagtgagaaaccaagaagagactaagctgatgaggactcctgaaataacttgttttttcctcttcctagaaggcctttcccactttcacaaacccaatcatcctcgtccttcaaggctcagttcagatgctacctcctccaagaagcctyttctgaactcccaaatttggcaagataccgctttgcattgttcctctttgctcccagtaataacccccattagtttctcttatagggctgccattggcagtagggtgggttggttcttcattgagtaattggattgttttatgcactgtagaaagttaagtattcttaactttcactccctaaatatcaatgatattcct

SEQ ID NO: 976 - DNA, 401 bp, Homo sapiens
cctcagaaataacaccgcatacctacaactgtctgatctttgacaaacctgagaaaaacaagaaatggggaaaggattccctatttaataaatggtgctgggaaaactggctagccatatgtagaaagctgaaactggatcccttccttacaccttatacaaaaatcaattcaagatggattaaagacttaaacgttagasctaaaaccataaaaaccctagaagaaaacctaggcattaccactcaggacataggcatgggcaaggacttcatgtccaaaacaccaaaagcaatggcaacaaaagacaaaattgacaaatgggatctaattaaactaaagagcttctgcacagcaaaagaaactaccatcagagtgaacaggcaacctacaaaatgggag

SEQ ID NO: 977 - DNA, 401 bp, Homo sapiens
gacacatgtatacatatgtaactaacctgcacaatgtgcacatgtaccctaaaacctaaagtataataaaaaaaagaaaagaaaaaaaaaaaaaaaaattgaaacatttttctggcttaaatacctacctttggtcttatcctaattaggcaccaatattcatgcaataatagattatatgcagtaattttttaattaaawcattaaaataattttgatccttaacaattaatgatcatttactcaccccgtaacaatatattatgtgctacaagtagagacaggtactgctgtaggaaactgtgccgtaagcaatggggatggatccactgcagtctgaggataatagtgtaataatgaaataagggaggggagtgtttttaaaagaagggggaagaaga

SEQ ID NO: 978 - DNA, 401 bp, Homo sapiens
ctttgcagatgtttagcagcctctagacaatagatgccaataacatccccaccctcacccaaaaatgtctccagacatggacaaatgccccctggggagatactccaagacacccccagttgagagccactgatttcaatcaataaaatgaaaccgtaatcgagtaacccaaattacggtggaacagactcccaaccactktactgcagaaattaaaatttccagggctgtcttgtatatgtgaaagaacagaatgctcatatttgtctcctcctgcctccgggtcactactgggtatccttgagagacaactgctccagtgggcacagactccaagctttccactggtagccacagctggtactgccctgtctggccttggaagattcctcagctcactc
